(19) United States
(12) Patent Application Publication
(10) Pub. No.: US 2009/0258017 A1
(43) Pub. Date: Oct. 15, 2009

(54) Lyophilized therapeutic peptibody Formulations

(76) Inventors: William J. Callahan, Thousand Oaks, CA (US); Richard L. Remmele, JR., Camarillo, CA (US); Gayathri Ratnaswamy, Encino, CA (US); Ramil F. Latypov, Seattle, WA (US); Dingjiang Liu, Oak Park, CA (US)

Correspondence Address: AMGEN INC., MAIL STOP 28-2-C, ONE AMGEN CENTER DRIVE, THOUSAND OAKS, CA, 91320-1799, US

(21) Appl. No.: 11/788,697

(22) Filed: Apr. 19, 2007

Related U.S. Application Data
(60) Provisional application No. 60/793,997, filed on Apr. 21, 2006.

(51) Int. Cl. A61K 39/395; A61P 43/00

(52) U.S. Cl. 424/134.1

(57) ABSTRACT

The present invention provides long-term stable formulations of a lyophilized therapeutic peptibody and methods for making a lyophilized composition comprising a therapeutic peptibody.

### FIELD OF THE INVENTION

[0001] Generally, the invention relates to formulations of lyophilized therapeutic peptibodies and methods for making a lyophilized composition comprising therapeutic peptibodies.

### BACKGROUND OF THE INVENTION

[0002] Recombinant proteins are an emerging class of therapeutic agents. Such recombinant therapeutics have engendered advances in protein formulation and chemical modification. Modifications have been identified that can protect therapeutic proteins, primarily by blocking their exposure to proteolytic enzymes. Protein modifications may also increase the therapeutic protein's stability, circulation time, and biological activity. A review article describing protein modification and fusion proteins is Francis (1992), Focus on Growth Factors 3:4-10 (Mediscript, London), which is hereby incorporated by reference.

[0003] One useful modification is combination of a polypeptide with an “Fc” domain of an antibody. Antibodies comprise two functionally independent parts, a variable domain known as “Fab,” which binds antigen, and a constant domain known as “Fc,” which links to such effector functions as complement activation and attack by phagocytic cells. An Fc has a long serum half-life, whereas an Fab is short-lived. Capon et al. (1989), Nature 337: 525-31. See also, e.g., U.S. Pat. No. 5,428,130. When constructed together with a therapeutic peptibody or protein, an Fc domain can provide longer half-life or incorporate such functions as Fc receptor binding, protein A binding, complement fixation and perhaps even placental transfer. Id. Table 1 summarizes use of Fc fusions with therapeutic proteins known in the art.

TABLE 1
Fc fusion with therapeutic proteins

| | Fusion | Therapeutic | |
|---|---|---|---|
| Form of Fc | partner | implications | Reference |
| IgG1 | N-terminus of | Hodgkin's disease; | U.S. Pat. No. 5,480,981 |
| | CD30-L | anaplastic lymphoma; T-cell | |
| | | leukemia | |
| Murine Fcγ2a | IL-10 | anti-inflammatory; | Zheng et al. (1995), J. |
| | | transplant rejection | Immunol. 154: 5590-600 |
| IgG1 | TNF receptor | septic shock | Fisher et al. (1996), N. |
| | | | Engl. J. Med. 334: 1697-1702; |
| | | | Van Zee, K. et al. |
| | | | (1996), J. Immunol. 156: |
| | | | 2221-30 |
| IgG, IgA, IgM, | TNF receptor | inflammation, autoimmune | U.S. Pat. No. 5,808,029, |
| or IgE | | disorders | issued Sep. 15, 1998 |
| (excluding the | | | |
| first domain) | | | |
| IgG1 | CD4 receptor | AIDS | Capon et al. (1989), Nature |
| | | | 337: 525-31 |
| IgG1, | N-terminus | anti-cancer, antiviral | Harvill et al. (1995), |
| IgG3 | of IL-2 | | Immunotech. 1: 95-105 |
| IgG1 | C-terminus of | osteoarthritis; | WO 97/23614, published |
| | OPG | bone density | Jul. 3, 1997 |
| IgG1 | N-terminus of | anti-obesity | PCT/US 97/23183, filed |
| | leptin | | Dec. 11, 1997 |
| Human Ig Cγ1 | CTLA-4 | autoimmune disorders | Linsley (1991), J. Exp. |
| | | | Med. 174: 561-9 |

[0004] Polyethylene glycol (“PEG”) conjugated or fusion proteins and peptides have also been studied for use in pharmaceuticals, on artificial implants, and other applications where biocompatibility is of importance. Various derivatives of PEG have been proposed that have an active moiety for permitting PEG to be attached to pharmaceuticals and implants and to molecules and surfaces generally. For example, PEG derivatives have been proposed for coupling PEG to surfaces to control wetting, static buildup, and attachment of other types of molecules to the surface, including proteins or protein residues.

[0005] In other studies, coupling of PEG (“PEGylation”) has been shown to be desirable in overcoming obstacles encountered in clinical use of biologically active molecules. Published PCT Publication No. WO 92/16221 states, for example, that many potentially therapeutic proteins have been found to have a short half life in blood serum.

[0006] PEGylation decreases the rate of clearance from the bloodstream by increasing the apparent molecular weight of the molecule. Up to a certain size, the rate of glomerular filtration of proteins is inversely proportional to the size of the protein. The ability of PEGylation to decrease clearance, therefore, is generally not a function of how many PEG groups are attached to the protein, but the overall molecular weight of the conjugated protein. Decreased clearance can lead to increased efficacy over the non-PEGylated material. See, for example, Conforti et al., Pharm. Research Commun. vol. 19, pg. 287 (1987) and Katre et., Proc. Natl. Acad. Sci. U.S.A. vol. 84, pg. 1487 (1987).

[0007] In addition, PEGylation can decrease protein aggregation, (Suzuki et al., Biochem. Biophys. Acta vol. 788, pg. 248 (1984)), alter (i.e.) protein immunogenicity (Abuchowski et al., J. Biol. Chem. vol. 252 pg. 3582 (1977)), and increase protein solubility as described, for example, in PCT Publication No. WO 92/16221.

[0008] In general, the interaction of a protein ligand with its receptor often takes place at a relatively large interface. However, as demonstrated in the case of human growth hormone bound to its receptor, only a few key residues at the interface actually contribute to most of the binding energy. Clackson, T. et al., Science 267:383-386 (1995). This observation and the fact that the bulk of the remaining protein ligand serves only to display the binding epitopes in the right topology makes it possible to find active ligands of much smaller size. Thus, molecules of only “peptide” length as defined herein can bind to the receptor protein of a given large protein ligand. Such peptides may mimic the bioactivity of the large protein ligand (“peptide agonists”) or, through competitive binding, inhibit the bioactivity of the large protein ligand (“peptide antagonists”).

[0009] Phage display peptide libraries have emerged as a powerful method in identifying such peptide agonists and antagonists. See, for example, Scott et al. (1990), Science 249: 386; Devlin et al. (1990), Science 249: 404; U.S. Pat. No. 5,223,409, issued Jun. 29, 1993; U.S. Pat. No. 5,733,731, issued Mar. 31, 1998; U.S. Pat. No. 5,498,530, issued Mar. 12, 1996; U.S. Pat. No. 5,432,018, issued Jul. 11, 1995; U.S. Pat. No. 5,338,665, issued Aug. 16, 1994; U.S. Pat. No. 5,922,545, issued Jul. 13, 1999; WO 96/40987, published Dec. 19, 1996; and WO 98/15833, published Apr. 16, 1998, each of which is incorporated by reference. In such libraries, random peptide sequences are displayed by fusion with coat proteins of filamentous phage. Typically, the displayed peptides are affinity-eluted against an antibody-immobilized extracellular domain of a receptor. The retained phages may be enriched by successive rounds of affinity purification and repropagation, and the best binding peptides are sequenced to identify key residues within one or more structurally related families of peptides. See, e.g., Cwirla et al. (1997), Science 276: 1696-9, in which two distinct families were identified. The peptide sequences may also suggest which residues may be safely replaced by alanine scanning or by mutagenesis at the DNA level. Mutagenesis libraries may be created and screened to further optimize the sequence of the best binders. Lowman (1997), Ann. Rev. Biophys. Biomol. Struct. 26: 401-24.

[0010] Other methods compete with phage display in peptide research. A peptide library can be fused to the carboxyl terminus of the lac repressor and expressed in E. coli. Another E. coli-based method allows display on the cell's outer membrane by fusion with a peptidoglycan-associated lipoprotein (PAL). These and related methods are collectively referred to as “E. coli display.” Another biological approach to screening soluble peptide mixtures uses yeast for expression and secretion. See Smith et al. (1993), Mol. Pharmacol. 43: 741-8. The method of Smith et al. and related methods are referred to as “yeast-based screening.” In another method, translation of random RNA is halted prior to ribosome release, resulting in a library of polypeptides with their associated RNA still attached. This and related methods are collectively referred to as “ribosome display.” Other methods employ chemical linkage of peptides to RNA; see, for example, Roberts & Szostak (1997), Proc. Natl. Acad. Sci. USA, 94: 12297-303. This and related methods are collectively referred to as “RNA-peptide screening.” Chemically derived peptide libraries have been developed in which peptides are immobilized on stable, non-biological materials, such as polyethylene rods or solvent-permeable resins. Another chemically derived peptide library uses photolithography to scan peptides immobilized on glass slides. These and related methods are collectively referred to as “chemical-peptide screening.” Chemical-peptide screening may be advantageous in that it allows use of D-amino acids and other unnatural analogues, as well as non-peptide elements. Both biological and chemical methods are reviewed in Wells & Lowman (1992), Curr. Opin. Biotechnol. 3: 355-62.

[0011] In the case of known bioactive peptides, rational design of peptide ligands with favorable therapeutic properties can be carried out. In such an approach, stepwise changes are made to a peptide sequence and the effect of the substitution upon bioactivity or a predictive biophysical property of the peptide (e.g., solution structure) is determined. These techniques are collectively referred to as “rational design.” In one such technique, a series of peptides is made in which a single residue at a time is replaced with alanine. This technique is commonly referred to as an “alanine walk” or an “alanine scan.” When two residues (contiguous or spaced apart) are replaced, it is referred to as a “double alanine walk.” The resultant amino acid substitutions can be used alone or in combination to result in a new peptide entity with favorable therapeutic properties.

[0012] Structural analysis of protein-protein interaction may also be used to suggest peptides that mimic the binding activity of large protein ligands. In such an analysis, the crystal structure may suggest the identity and relative orientation of critical residues of the large protein ligand, from which a peptide may be designed. See, e.g., Takasaki et al. (1997), Nature Biotech. 15: 1266-70. These and related methods are referred to as “protein structural analysis.” These analytical methods may also be used to investigate the interaction between a receptor protein and peptides selected by phage display, which may suggest further modification of the peptides to increase binding affinity.

[0013] Conceptually, peptide mimetics of any protein can be identified using phage display and the other methods mentioned above. These methods have also been used for epitope mapping, for identification of critical amino acids in protein-protein interactions, and as leads for the discovery of new therapeutic agents. E.g., Cortese et al. (1996), Curr. Opin. Biotech. 7: 616-21. Peptide libraries are now being used most often in immunological studies, such as epitope mapping. Kreeger (1996), The Scientist 10(13): 19-20.

[0014] Of particular interest is use of peptide libraries and other techniques in the discovery of pharmacologically active peptides. A number of such peptides identified in the art are summarized in Table 2. The peptides are described in the listed publications, each of which is hereby incorporated by reference. The pharmacologic activity of the peptides is described, and in many instances is followed by a shorthand term therefor in parentheses. Some of these peptides have been modified (e.g., to form C-terminally cross-linked dimers). Typically, peptide libraries were screened for binding to a receptor for a pharmacologically active protein (e.g., EPO receptor). In at least one instance (CTLA4), the peptide library was screened for binding to a monoclonal antibody.

TABLE 2
Pharmacologically active peptides

| | Binding | | |
|---|---|---|---|
| | partner/ | | |
| Form of | protein of | Pharmacologic | |
| peptide | interest¹ | activity | Reference |
| intrapeptide | EPO receptor | EPO-mimetic | Wrighton et al. (1996), |
| disulfide- | | | Science 273: 458-63; U.S. |
| bonded | | | Pat. No. 5,773,569, issued |
| | | | Jun. 30, 1998 to Wrighton |
| | | | et al. |
| C-terminally | EPO receptor | EPO-mimetic | Livnah et al. (1996), |
| cross-linked | | | Science 273: 464-71; |
| dimer | | | Wrighton et al. (1997), |
| | | | Nature Biotechnology 15: |
| | | | 1261-5; International patent |
| | | | application WO 96/40772, |
| | | | published Dec. 19, 1996 |
| linear | EPO receptor | EPO-mimetic | Naranda et al. (1999), Proc. |
| | | | Natl. Acad. Sci. USA, 96: |
| | | | 7569-74; WO 99/47151, |
| | | | published Sep. 23, |
| | | | 1999 |
| linear | c-Mpl | TPO-mimetic | Cwirla et al.(1997) Science |
| | | | 276: 1696-9; U.S. Pat. No. |
| | | | 5,869,451, issued Feb. 9, |
| | | | 1999; U.S. Pat. No. |
| | | | 5,932,946, issued Aug. 3, |
| | | | 1999 |
| C-terminally | c-Mpl | TPO-mimetic | Cwirla et al. (1997), |
| cross-linked | | | Science 276: 1696-9 |
| dimer | | | |
| disulfide- | | stimulation of hematopoiesis | Paukovits et al. (1984), |
| linked dimer | | (“G-CSF-mimetic”) | Hoppe-Seylers Z. Physiol. |
| | | | Chem. 365: 303-11; |
| | | | Laerum et al. (1988), Exp. |
| | | | Hemat. 16: 274-80 |
| alkylene- | | G-CSF-mimetic | Bhatnagar et al. (1996), J. |
| linked dimer | | | Med. Chem. 39: 3814-9; |
| | | | Cuthbertson et al. (1997), J. |
| | | | Med. Chem. 40: 2876-82; |
| | | | King et al. (1991), Exp. |
| | | | Hematol. 19: 481; King et |
| | | | al. (1995), Blood 86 |
| | | | (Suppl. 1): 309a |
| linear | IL-1 receptor | inflammatory and | U.S. Pat. No. 5,608,035; |
| | | autoimmune diseases | U.S. Pat. No. 5,786,331; |
| | | (“IL-1 antagonist” or | U.S. Pat. No. 5,880,096; |
| | | “IL-1ra-mimetic”) | Yanofsky et al. (1996), |
| | | | Proc. Natl. Acad. Sci. 93: |
| | | | 7381-6; Akeson et al. |
| | | | (1996), J. Biol. Chem. 271: |
| | | | 30517-23; Wiekzorek et al. |
| | | | (1997), Pol. J. Pharmacol. |
| | | | 49: 107-17; Yanofsky |
| | | | (1996), PNAs, 93: 7381-7386. |
| linear | Facteur thymique | stimulation of lymphocytes | Inagaki-Ohara et al. (1996), |
| | serique (FTS) | (“FTS-mimetic”) | Cellular Immunol. 171: 30-40; |
| | | | Yoshida (1984), Int. J. |
| | | | Immunopharmacol, 6: 141-6. |
| intrapeptide | CTLA4 MAb | CTLA4-mimetic | Fukumoto et al. (1998), |
| disulfide | | | Nature Biotech. 16: 267-70 |
| bonded | | | |
| exocyclic | TNF-α receptor | TNF-α antagonist | Takasaki et al. (1997), |
| | | | Nature Biotech. 15: 1266-70; |
| | | | WO 98/53842, |
| | | | published Dec. 3, |
| | | | 1998 |
| linear | TNF-α receptor | TNF-α antagonist | Chirinos-Rojas (1998), J. |
| | | | Imm., 5621-5626. |
| intrapeptide | C3b | inhibition of complement | Sahu et al. (1996), J. |
| disulfide | | activation; autoimmune | Immunol. 157: 884-91; |
| bonded | | diseases | Morikis et al. (1998), |
| | | (“C3b-antagonist”) | Protein Sci. 7: 619-27 |
| linear | vinculin | cell adhesion processes- | Adey et al. (1997), |
| | | cell growth, differentiation, | Biochem. J. 324: 523-8 |
| | | wound healing, tumor | |
| | | metastasis (“vinculin | |
| | | binding”) | |
| linear | C4 binding | anti-thrombotic | Linse et al. (1997), J. Biol. |
| | protein (C4BP) | | Chem. 272: 14658-65 |
| linear | urokinase receptor | processes associated with | Goodson et al. (1994), |
| | | urokinase interaction with its | Proc. Natl. Acad. Sci. 91: |
| | | receptor (e.g., angiogenesis, | 7129-33; International |
| | | tumor cell invasion and | application WO 97/35969, |
| | | metastasis); (“UKR | published Oct. 2, 1997 |
| | | antagonist”) | |
| linear | Mdm2, Hdm2 | Inhibition of inactivation of | Picksley et al. (1994), |
| | | p53 mediated by Mdm2 or | Oncogene 9: 2523-9; |
| | | hdm2; anti-tumor | Bottger et al. (1997) J. Mol. |
| | | (“Mdm/hdm antagonist”) | Biol. 269: 744-56; Bottger |
| | | | et al. (1996), Oncogene 13: |
| | | | 2141-7 |
| linear | p21^{WAF1} | anti-tumor by mimicking the | Ball et al. (1997), Curr. |
| | | activity of p21^{WAF1} | Biol. 7: 71-80 |
| linear | farnesyl | anti-cancer by preventing | Gibbs et al. (1994), Cell |
| | transferase | activation of ras oncogene | 77: 175-178 |
| linear | Ras effector | anti-cancer by inhibiting | Moodie et al. (1994), |
| | domain | biological function of the ras | Trends Genet 10: 44-48 |
| | | oncogene | Rodriguez et al. (1994), |
| | | | Nature 370: 527-532 |
| linear | SH2/SH3 | anti-cancer by inhibiting | Pawson et al (1993), Curr. |
| | domains | tumor growth with activated | Biol. 3: 434-432 |
| | | tyrosine kinases; treatment | Yu et al. (1994), Cell |
| | | of SH3-mediated disease | 76: 933-945; Rickles et al. |
| | | states (“SH3 antagonist”) | (1994), EMBO J. 13: 5598-5604; |
| | | | Sparks et al. (1994), |
| | | | J. Biol. Chem. 269: 23853-6; |
| | | | Sparks et al. (1996), |
| | | | Proc. Natl. Acad. Sci. 93: |
| | | | 1540-4; U.S. Pat. No. |
| | | | 5,886,150, issued Mar. |
| | | | 23, 1999; U.S. Pat. No. |
| | | | 5,888,763, issued Mar. |
| | | | 30, 1999 |
| linear | p16^{INK4} | anti-cancer by mimicking | Fåhraeus et al. (1996), |
| | | activity of p16; e.g., | Curr. Biol. 6: 84-91 |
| | | inhibiting cyclin D-Cdk | |
| | | complex (“p16-mimetic”) | |
| linear | Src, Lyn | inhibition of Mast cell | Stauffer et al. (1997), |
| | | activation, IgE-related | Biochem. 36: 9388-94 |
| | | conditions, type I | |
| | | hypersensitivity (“Mast cell | |
| | | antagonist”) | |
| linear | Mast cell protease | treatment of inflammatory | International application |
| | | disorders mediated by | WO 98/33812, published |
| | | release of tryptase-6 | Aug. 6, 1998 |
| | | (“Mast cell protease | |
| | | inhibitors”) | |
| linear | HBV core antigen | treatment of HBV viral | Dyson & Muray (1995), |
| | (HBcAg) | infections (“anti-HBV”) | Proc. Natl. Acad. Sci. 92: |
| | | | 2194-8 |
| linear | selectins | neutrophil adhesion; | Martens et al. (1995), J. |
| | | inflammatory diseases | Biol. Chem. 270: 21129-36; |
| | | (“selectin antagonist”) | European patent |
| | | | application EP 0 714 912, |
| | | | published Jun. 5, 1996 |
| linear, cyclized | calmodulin | calmodulin antagonist | Pierce et al. (1995), Molec. |
| | | | Diversity 1: 259-65; |
| | | | Dedman et al. (1993), J. |
| | | | Biol. Chem. 268: 23025-30; |
| | | | Adey & Kay (1996), |
| | | | Gene 169: 133-4 |
| linear, | integrins | tumor-homing; treatment for | International applications |
| cyclized- | | conditions related to | WO 95/14714, published |
| | | integrin-mediated cellular | Jun. 1, 1995; WO |
| | | events, including platelet | 97/08203, published Mar. |
| | | aggregation, thrombosis, | 6, 1997; WO 98/10795, |
| | | wound healing, | published Mar. 19, 1998; |
| | | osteoporosis, tissue repair, | WO 99/24462, published |
| | | angiogenesis (e.g., for | May 20, 1999; Kraft et al. |
| | | treatment of cancer), and | (1999), J. Biol. Chem. 274: |
| | | tumor invasion | 1979-1985 |
| | | (“integrin-binding”) | |
| cyclic, linear | fibronectin and | treatment of inflammatory | WO 98/09985, published |
| | extracellular | and autoimmune conditions | Mar. 12, 1998 |
| | matrix | | |
| | components of T | | |
| | cells and | | |
| | macrophages | | |
| linear | somatostatin and | treatment or prevention of | European patent application |
| | cortistatin | hormone-producing tumors, | 0 911 393, published Apr. |
| | | acromegaly, giantism, | 28, 1999 |
| | | dementia, gastric ulcer, | |
| | | tumor growth, inhibition of | |
| | | hormone secretion, | |
| | | modulation of sleep or | |
| | | neural activity | |
| linear | bacterial | antibiotic; septic shock; | U.S. Pat. No. 5,877,151, |
| | lipopolysaccharide | disorders modulatable by | issued Mar. 2, 1999 |
| | | CAP37 | |
| linear or | pardaxin, mellitin | antipathogenic | WO 97/31019, published |
| cyclic, | | | 28 Aug. 1997 |
| including D- | | | |
| amino acids | | | |
| linear, cyclic | VIP | impotence, | WO 97/40070, published |
| | | neurodegenerative disorders | Oct. 30, 1997 |
| linear | CTLs | cancer | EP 0 770 624, published |
| | | | May 2, 1997 |
| linear | THF-gamma2 | | Burnstein (1988), |
| | | | Biochem., 27: 4066-71. |
| linear | Amylin | | Cooper (1987), Proc. Natl. |
| | | | Acad. Sci., 84: 8628-32. |
| linear | Adrenomedullin | | Kitamura (1993), BBRC, |
| | | | 192: 553-60. |
| cyclic, linear | VEGF | anti-angiogenic; cancer, | Fairbrother (1998), |
| | | rheumatoid arthritis, diabetic | Biochem., 37: 17754-17764. |
| | | retinopathy, psoriasis | |
| | | (“VEGF antagonist”) | |
| cyclic | MMP | inflammation and | Koivunen (1999), Nature |
| | | autoimmune disorders; | Biotech., 17: 768-774. |
| | | tumor growth | |
| | | (“MMP inhibitor”) | |
| | HGH fragment | treatment of obesity | U.S. Pat. No. 5,869,452 |
| | Echistatin | inhibition of platelet | Gan (1988), J. Biol. Chem., |
| | | aggregation | 263: 19827-32. |
| linear | SLE autoantibody | SLE | WO 96/30057, published |
| | | | Oct. 3, 1996 |
| | GD1alpha | suppression of tumor | Ishikawa et al. (1998), |
| | | metastasis | FEBS Lett. 441 (1): 20-4 |
| | antiphospholipid | endothelial cell activation, | Blank et al. (1999), Proc. |
| | beta-2- | antiphospholipid syndrome | Natl. Acad. Sci. USA 96: |
| | glycoprotein-I | (APS), thromboembolic | 5164-8 |
| | (β2GPI) | phenomena, | |
| | antibodies | thrombocytopenia, and | |
| | | recurrent fetal loss | |
| linear | T Cell Receptor | diabetes | WO 96/11214, published |
| | beta chain | | Apr. 18, 1996. |
| | | Antiproliferative, antiviral | WO 00/01402, published |
| | | | Jan. 13, 2000. |
| | | anti-ischemic, growth | WO 99/62539, published |
| | | hormone-liberating | Dec. 9, 1999. |
| | | anti-angiogenic | WO 99/61476, published |
| | | | Dec. 2, 1999. |
| linear | | Apoptosis agonist; treatment | WO 99/38526, published |
| | | of T cell-associated | Aug. 5, 1999. |
| | | disorders (e.g., autoimmune | |
| | | diseases, viral infection, T | |
| | | cell leukemia, T cell | |
| | | lymphoma) | |
| linear | MHC class II | treatment of autoimmune | U.S. Pat. No. 5,880,103, |
| | | diseases | issued Mar. 9, 1999. |
| linear | androgen R, p75, | proapoptotic, useful in | WO 99/45944, published |
| | MJD, DCC, | treating cancer | Sep. 16, 1999. |
| | huntingtin | | |
| linear | von Willebrand | inhibition of Factor VIII | WO 97/41220, published |
| | Factor; Factor | interaction; anticoagulants | Apr. 29, 1997. |
| | VIII | | |
| linear | lentivirus LLP1 | antimicrobial | U.S. Pat. No. 5,945,507, |
| | | | issued Aug. 31, 1999. |
| linear | Delta-Sleep | sleep disorders | Graf (1986), Peptides |
| | Inducing Peptide | | 7: 1165. |
| linear | C-Reactive | inflammation and cancer | Barna (1994), Cancer |
| | Protein (CRP) | | Immunol. Immunother. |
| | | | 38: 38 (1994). |
| linear | Sperm-Activating | infertility | Suzuki (1992), Comp. |
| | Peptides | | Biochem. Physiol. |
| | | | 102B: 679. |
| linear | angiotensins | hematopoietic factors for | Lundergan (1999), J. |
| | | hematocytopenic conditions | Periodontal Res. 34(4): 223-228. |
| | | from cancer, AIDS, etc. | |
| linear | HIV-1 gp41 | anti-AIDS | Chan (1998), Cell 93: 681-684. |
| linear | PKC | inhibition of bone resorption | Moonga (1998), Exp. |
| | | | Physiol. 83: 717-725. |
| linear | defensins (HNP- | antimicrobial | Harvig (1994), Methods |
| | 1, -2, -3, -4) | | Enz. 236: 160-172. |
| linear | p185^{HER2/neu}, C- | AHNP-mimetic: anti-tumor | Park (2000), Nat. |
| | erbB-2 | | Biotechnol. 18: 194-198. |
| linear | gp130 | IL-6 antagonist | WO 99/60013, published |
| | | | Nov. 25, 1999. |
| linear | collagen, other | autoimmune diseases | WO 99/50282, published |
| | joint, cartilage, | | Oct. 7, 1999. |
| | arthritis-related | | |
| | proteins | | |
| linear | HIV-1 envelope | treatment of neurological | WO 99/51254, published |
| | protein | degenerative diseases | Oct. 14, 1999. |
| linear | IL-2 | autoimmune disorders (e.g., | WO 00/04048, published |
| | | graft rejection, rheumatoid | Jan. 27, 2000; WO |
| | | arthritis) | 00/11028, published Mar. |
| | | | 2, 2000. |

¹The protein listed in this column may be bound by the associated peptide (e.g., EPO receptor, IL-1 receptor) or mimicked by the associated peptide. The references listed for each clarify whether the molecule is bound by or mimicked by the peptides.

[0015] Peptides identified by peptide library screening have been regarded as “leads” in development of therapeutic agents rather than being used as therapeutic agents themselves. Like other proteins and peptides, they would be rapidly removed in vivo either by renal filtration, cellular clearance mechanisms in the reticuloendothelial system, or proteolytic degradation. (Francis (1992), Focus on Growth Factors 3: 4-11.) As a result, the art presently uses the identified peptides to validate drug targets or as scaffolds for design of organic compounds that might not have been as easily or as quickly identified through chemical library screening. Lowman (1997), Ann. Rev. Biophys. Biomol. Struct. 26: 401-24; Kay et al. (1998), Drug Disc. Today 3: 370-8.

[0016] Typically, purified peptides are only marginally stable in an aqueous state and undergo chemical and physical degradation resulting in a loss of biological activity during processing and storage. Additionally, peptide compositions in aqueous solution undergo hydrolysis, such as deamidation and peptide bond cleavage. These effects represent a serious problem for therapeutically active peptides which are intended to be administered to humans within a defined dosage range based on biological activity.

[0017] Administration of purified peptides remains a promising treatment strategy for many diseases that affect the human population. However, the ability of the therapeutic peptibody to remain a stable pharmaceutical composition over time in a variety of storage conditions and then be effective for patients in vivo has not been addressed. Thus, there remains a need in the art to provide therapeutic peptibodies in stable formulations that are useful as therapeutic agents for the treatment of diseases and disorders.

### SUMMARY OF THE INVENTION

[0018] The present invention provides formulations useful for lyophilization of therapeutic peptibodies, resulting in a highly stable therapeutic peptibody product. The stable therapeutic peptibody product is useful as a therapeutic agent in the treatment of individuals suffering from disorders or conditions that can benefit from the administration of the therapeutic peptibody.

[0019] In one aspect, the invention provides a lyophilized therapeutic peptibody composition comprising a buffer, a bulking agent, a stabilizing agent, and optionally a surfactant; wherein the buffer is comprised of a pH buffering agent in a range of about 5 mM to about 20 mM and wherein the pH is in a range of about 3.0 to about 8.0; wherein the bulking agent is at a concentration of about 0% to about 4.5% w/v; wherein the stabilizing agent is at a concentration of about 0.1% to about 20% w/v; wherein the surfactant is at a concentration of about 0.004% to about 0.4% w/v; and wherein the therapeutic peptibody comprises a structure set out in Formula I,

[(X¹)ₐ—F¹—(X²)_{b}]-(L¹)_{c}-WSP_{d} Formula I

wherein:

[0020] F¹ is an Fc domain;

[0021] X¹ is selected from
[0022] P¹-(L²)ₑ—
[0023] P²-(L³)_{f}-P¹-(L²)ₑ—
[0024] P³-(L⁴)-P²-(L³)_{f}-P¹-(L²)ₑ- and
[0025] P⁴-(L⁵)ₕ-P³-(L⁴)_{g}-P²-(L³)_{f}-P¹-(L²)ₑ—

[0026] X² is selected from:
[0027] -(L²)ₑ-P¹,
[0028] -(L²)ₑ-P¹-(L³)_{f}-P²,
[0029] -(L²)ₑ-P¹-(L³)_{f}-P²-(L⁴)_{g}-P³, and
[0030] -(L²)ₑ-P¹-(L³)_{f}-P²-(L⁴)_{g}-P³-(L⁵)ₕ-P⁴

[0031] wherein P¹, P², P³, and P⁴ are each independently sequences of pharmacologically active peptides;

[0032] L¹, L², L³, L⁴, and L⁵ are each independently linkers;

[0033] a, b, c, e, f, g, and h are each independently 0 or 1,
[0034] provided that at least one of a and b is 1;

[0035] d is 0, 1, or greater than 1; and

[0036] WSP is a water soluble polymer, the attachment of which is effected at any reactive moiety in F¹.

[0037] In another embodiment, the therapeutic peptibody comprises a structure set out in Formula II

[X¹—F¹]-(L¹)_{c}-WSP_{d} Formula II

wherein the Fc domain is attached at the C-terminus of X¹, and zero, one or more WSP is attached to the Fc domain, optionally through linker L¹.

[0038] In still another embodiment, the therapeutic peptibody comprises a structure set out in Formula III

[F¹—X²]-(L¹)_{c}-WSP_{d} Formula III

wherein the Fc domain is attached at the N-terminus of X², and zero, one or more WSP is attached to the Fc domain, optionally through linker L¹.

[0039] In yet another embodiment, the therapeutic peptibody comprises a structure set out in Formula IV

[F¹-(L¹)ₑ-P¹]-(L¹)_{c}-WSP_{d} Formula IV

wherein the Fc domain is attached at the N-terminus of -(L¹)_{c}-P¹ and zero, one or more WSP is attached to the Fc domain, optionally through linker L¹.

[0040] In another embodiment, the therapeutic peptibody comprises a structure set out in Formula V

[F¹-(L¹)ₑ-P¹-(L²)_{f}-P²]-(L¹)_{c}-WSP_{d} Formula V

wherein the Fc domain is attached at the N-terminus of -L¹-P¹-L²-P² and zero, one or more WSP is attached to the Fc domain, optionally through linker L¹.

[0041] In another embodiment, the therapeutic peptibody is a multimer or dimer. In another embodiment, an aforementioned composition is provided wherein P¹, P², P³ and/or P⁴ are independently selected from a peptide set out in any one of Tables 4 through 38. In a related embodiment, P¹, P², P³ and/or P⁴ have the same amino acid sequence. In another embodiment, the Fc domain is set out in SEQ ID NO:1. In another embodiment, WSP is PEG. In still another embodiment, the Fc domain is et out in SEQ ID NO:1 and WSP is PEG. In another embodiment, the PEG has a molecular weight of between about 2 kDa and 100 kDa, or between 6 kDa and 25 kDa. In another embodiment, the composition comprises at least 50%, 75%, 85%, 90%, or 95% PEGylated therapeutic peptibody.

[0042] In yet another embodiment of the invention, an aforementioned composition is provided wherein the pH buffering agent is selected from the group consisting of glycine, histidine, glutamate, succinate, phosphate, acetate, and aspartate. In yet another embodiment of the invention, an aforementioned composition is provided wherein the bulking agent selected from the group consisting of mannitol, glycine, sucrose, dextran, polyvinylpyrolidone, carboxymethylcellulose, lactose, sorbitol, trehalose, or xylitol.

[0043] In yet another embodiment of the invention, an aforementioned composition is provided wherein the stabilizing agent selected from the group consisting of sucrose, trehalose, mannose, maltose, lactose, glucose, raffinose, cellobiose, gentiobiose, isomaltose, arabinose, glucosamine, fructose, mannitol, sorbitol, glycine, arginine HCL, poly-hydroxy compounds, including polysaccharides such as dextran, starch, hydroxyethyl starch, cyclodextrins, N-methylpyrollidene, cellulose and hyaluronic acid, sodium chloride.

[0044] In yet another embodiment of the invention, an aforementioned composition is provided wherein the surfactant selected from the group consisting of sodium lauryl sulfate, dioctyl sodium sulfosuccinate, dioctyl sodium sulfonate, chenodeoxycholic acid, N-lauroylsarcosine sodium salt, lithium dodecyl sulfate, 1-octanesulfonic acid sodium salt, sodium cholate hydrate, sodium deoxycholate, glycodeoxycholic acid sodium salt, benzalkonium chloride or benzethonium chloride, cetylpyridinium chloride monohydrate, hexadecyltrimethylammonium bromide, CHAPS, CHAPSO, SB3-10, SB3-12, digitonin, Triton X-100, Triton X-114, lauromacrogol 400, polyoxyl 40 stearate, polyoxyethylene hydrogenated castor oil 10, 40, 50 and 60, glycerol monostearate, polysorbate 20, 40, 60, 65 and 80, soy lecithin, DOPC, DMPG, DMPC, and DOPG; sucrose fatty acid ester, methyl cellulose and carboxymethyl cellulose. In yet another embodiment of the invention, an aforementioned composition is provided wherein the therapeutic peptibody concentration is between about 0.25 mg/mL and 250 mg/mL.

[0045] In another embodiment of the invention, an aforementioned composition is provided wherein the pH buffering agent is 10 mM histidine and wherein the pH is 5.0; wherein the bulking agent is 4% w/v mannitol; wherein the stabilizing agent is 2% w/v sucrose; and wherein the surfactant is 0.004% w/v polysorbate-20. In another embodiment, the aforementioned composition is provided wherein P¹ comprises a sequence set forth in Table 6. In yet another embodiment of the invention, an aforementioned composition is provided wherein the therapeutic peptibody concentration is 0.5 mg/mL. In another embodiment, the therapeutic peptibody is any one of SEQ ID NO:993, SEQ ID NO:994, SEQ ID NO:995, SEQ ID NO:996, SEQ ID NO:997, SEQ ID NO:998, SEQ ID NO:999, SEQ ID NO:1000, SEQ ID NO:1001, SEQ ID NO:1002, SEQ ID NO:1003, SEQ ID NO:1004, SEQ ID NO:1005, SEQ ID NO:1006, SEQ ID NO:1007, SEQ ID NO:1008, SEQ ID NO:1009, SEQ ID NO:1010, SEQ ID NO:1011, SEQ ID NO:1012, SEQ ID NO:1013, SEQ ID NO:1014, SEQ ID NO:1015, SEQ ID NO:1016, or SEQ ID NO:1017.

[0046] In yet another embodiment of the invention, an aforementioned composition is provided wherein the pH buffering agent is 10 mM histidine and wherein the pH is 7.0; wherein the bulking agent is 4% w/v mannitol; wherein the stabilizing agent is 2% w/v sucrose; and wherein the surfactant is 0.01% w/v polysorbate-20. In another embodiment, the aforementioned composition is provided wherein P¹ comprises a sequence set forth in Table 32. In yet another embodiment of the invention, an aforementioned composition is provided wherein the therapeutic peptibody concentration is 30 mg/mL.

[0047] In still another embodiment of the invention, an aforementioned composition is provided wherein the pH buffering agent is 20 mM histidine and wherein the pH is 5.0; wherein the bulking agent is 3.3% w/v mannitol; wherein the stabilizing agent is 2% w/v sucrose; and wherein the surfactant is 0.01% w/v polysorbate-20. In another embodiment, the aforementioned composition is provided wherein P¹ comprises a sequence set forth in Table 4. In yet another embodiment of the invention, an aforementioned composition is provided wherein the therapeutic peptibody concentration is 100 mg/mL.

In still another embodiment of the invention, an aforementioned composition is provided wherein the pH buffering agent is 10 mM histidine and wherein the pH is 5.0; wherein the bulking agent is 2.5% w/v mannitol; and wherein the stabilizing agent is 3.5% w/v sucrose. In another embodiment, the aforementioned composition is provided wherein P¹ comprises a sequence set forth in Table 31. In yet another embodiment of the invention, an aforementioned composition is provided wherein the therapeutic peptibody concentration is 30 mg/mL.

[0048] In another embodiment of the invention, an aforementioned composition is provided wherein the composition is selected from the group consisting of: a) 10 mM histidine, pH 4.7, 4% mannitol and 2% sucrose, with and without 0.004% polysorbate-20; b) 10 mM histidine, pH 5, 4% mannitol and 2% sucrose, with and without 0.004% polysorbate-20; c) 10 mM glutamate, pH 4.5, 4% mannitol and 2% sucrose with and without 0.004% polysorbate-20; d) 10 mM succinate, pH 4.5, 4% mannitol and 2% sucrose, 0.004% polysorbate-20; e) 10 mM glutamate, pH 4.5, 9% sucrose, 0.004% polysorbate-20; f) 10 mM glutamate, pH 4.5, 4% mannitol, 2% sucrose, 1% hydroxyethyl starch, 0.004% polysorbate-20; g) 5 mM glutamate, pH 4.5, 2% mannitol, 1% sucrose, 0.004% polysorbate-20; and h) 10 mM glutamate, pH 4.5, 4% mannitol, 2% trehalose, 0.004% polysorbate-20. In another embodiment, the aforementioned composition is provided wherein P¹ comprises a sequence set forth in Tables 21-24. In still another embodiment, the aforementioned composition is provided wherein the therapeutic peptibody concentration is selected from the group consisting of 1, 30, 85, and 100 mg/mL.

[0049] The present invention also contemplates methods of making lyophilized therapeutic peptibodies of the present invention. In one embodiment, the invention provides a method for making a lyophilized therapeutic peptibody comprising the steps of: a) preparing a solution of a buffer, a bulking agent, a stabilizing agent, and a optionally surfactant; wherein the buffer is comprised of a pH buffering agent in a range of about 5 mM to about 20 mM and wherein the pH is in a range of about 3.0 to about 8.0; wherein the bulking agent is at a concentration of about 2.5% to about 4% w/v; wherein the stabilizing agent is at a concentration of about 0.1% to about 5% w/v; wherein the surfactant is at a concentration of about 0.004% to about 0.04% w/v; and b) lyophilizing the therapeutic peptibody; wherein the therapeutic peptibody comprises a structure set out in Formula I,

[(X¹)ₐ—F¹—(X²)_{b}]-(L¹)_{c}-WSP_{d} Formula I

wherein:

[0050] F¹ is an Fc domain;

[0051] X¹ is selected from
[0052] P¹-(L²)ₑ—
[0053] P²-(L³)_{f}-P¹-(L²)ₑ—
[0054] P³-(L⁴)_{g}-P²-(L³)_{f}-P¹-(L²)ₑ- and
[0055] P⁴-(L⁵)ₕ-P³-(L⁴)_{g}-P²-(L³)_{f}-P¹-(L²)ₑ

[0056] X² is selected from:
[0057] -(L²)ₑ-P¹,
[0058] -(L²)ₑ-P¹-(L¹)_{f}-P²,
[0059] -(L²)ₑ-P¹-(L³)_{f}-P²-(L⁴)_{g}-P³, and
[0060] -(L²)ₑ-P¹-(L³)_{f}-P²-(L⁴)_{g}-P³-(L⁵)ₕ-P⁴

[0061] wherein P¹, P², P³, and P⁴ are each independently sequences of pharmacologically active peptides;

[0062] L¹, L², L³, L⁴, and L⁵ are each independently linkers;

[0063] a, b, c, e, f, g, and h are each independently 0 or 1,
[0064] provided that at least one of a and b is 1;

[0065] d is 0, 1, or greater than 1; and

[0066] WSP is a water soluble polymer, the attachment of which is effected at any reactive moiety in F¹.

[0067] In another embodiment, the aforementioned method is provided wherein the therapeutic peptibody comprises a structure set out in Formula II

[X¹—F¹]-(L¹)_{c}-WSP_{d} Formula II

wherein the Fc domain is attached at the C-terminus of X¹, and zero, one or more WSP is attached to the Fc domain, optionally through linker L¹.

[0068] In another embodiment, the aforementioned method is provided wherein the therapeutic peptibody comprises a structure set out in Formula III

[F¹—X²]-(L¹)_{c}-WSP_{d} Formula III

wherein the Fc domain is attached at the N-terminus of X², and zero, one or more WSP is attached to the Fc domain, optionally through linker L¹.

[0069] In another embodiment, the aforementioned method is provided wherein the therapeutic peptibody comprises a structure set out in Formula IV

[F¹-(L¹)ₑ-P¹]-(L¹)_{c}-WSP_{d} Formula IV

wherein the Fc domain is attached at the N-terminus of -(L¹)_{c}-P¹ and zero, one or more WSP is attached to the Fc domain, optionally through linker L¹.

[0070] In another embodiment, the aforementioned method is provided wherein the therapeutic peptibody comprises a structure set out in Formula V

[F¹-(L¹)ₑ-P¹-(L²)_{f}-P²]-(L¹)_{c}-WSP_{d} Formula V

wherein the Fc domain is attached at the N-terminus of -L¹-P¹-L²-P² and zero, one or more WSP is attached to the Fc domain, optionally through linker L¹.

[0071] In another embodiment, the aforementioned method is provided wherein the therapeutic peptibody is a multimer or dimer. In another embodiment, the P¹, P², P³ and/or P⁴ are independently selected from a peptide set out in any one of Tables 4 through 38. In another embodiment, the P¹, P², P³ and/or P⁴ have the same amino acid sequence. In another embodiment, the Fc domain is set out in SEQ ID NO:1. In another embodiment, WSP is PEG. In another embodiment, the Fc domain is set out in SEQ ID NO:1 and WSP is PEG. In another embodiment, PEG has a molecular weight of between about 2 kDa and 100 kDa or between about 6 kDa and 25 kDa. In another embodiment, the aforementioned method is provided wherein the composition comprises at least 50%, 75%, 85%, 90%, or 95% PEGylated therapeutic peptibody.

[0072] In another embodiment, the aforementioned method is provided wherein the pH buffering agent is selected from the group consisting of glycine, histidine, glutamate, succinate, phosphate, acetate, and aspartate. In another embodiment, the aforementioned method is provided wherein the bulking agent selected from the group consisting of mannitol, glycine, sucrose, dextran, polyvinylpyrolidone, carboxymethylcellulose, lactose, sorbitol, trehalose, or xylitol. In another embodiment, the aforementioned method is provided wherein the stabilizing agent selected from the group consisting of sucrose, trehalose, mannose, maltose, lactose, glucose, raffinose, cellobiose, gentiobiose, isomaltose, arabinose, glucosamine, fructose, mannitol, sorbitol, glycine, arginine HCL, poly-hydroxy compounds, including polysaccharides such as dextran, starch, hydroxyethyl starch, cyclodextrins, N-methylpyrollidene, cellulose and hyaluronic acid, sodium chloride.

[0073] In another embodiment, the aforementioned method is provided wherein the surfactant selected from the group consisting of sodium lauryl sulfate, dioctyl sodium sulfosuccinate, dioctyl sodium sulfonate, chenodeoxycholic acid, N-lauroylsarcosine sodium salt, lithium dodecyl sulfate, 1-octanesulfonic acid sodium salt, sodium cholate hydrate, sodium deoxycholate, glycodeoxycholic acid sodium salt, benzalkonium chloride or benzethonium chloride, cetylpyridinium chloride monohydrate, hexadecyltrimethylammonium bromide, CHAPS, CHAPSO, SB3-10, SB3-12, digitonin, Triton X-100, Triton X-114, lauromacrogol 400, polyoxyl 40 stearate, polyoxyethylene hydrogenated castor oil 10, 40, 50 and 60, glycerol monostearate, polysorbate 20, 40, 60, 65 and 80, soy lecithin, DOPC, DMPG, DMPC, and DOPG; sucrose fatty acid ester, methyl cellulose and carboxymethyl cellulose. In another embodiment, the aforementioned method is provided wherein the therapeutic peptibody concentration is between about 0.25 mg/mL and 250 mg/mL.

[0074] In another embodiment, an aforementioned method is provided wherein the pH buffering agent is 10 mM histidine and wherein the pH is 5.0; wherein the bulking agent is 4% w/v mannitol; wherein the stabilizing agent is 2% w/v sucrose; and wherein the surfactant is 0.004% w/v polysorbate-20. In another embodiment, the aforementioned method is provided wherein P¹ comprises a sequence set forth in Table 6. In another embodiment, the aforementioned method is provided wherein the therapeutic peptibody concentration is 0.5 mg/mL.

[0075] In another embodiment, an aforementioned method is provided wherein the pH buffering agent is 10 mM histidine and wherein the pH is 7.0; wherein the bulking agent is 4% w/v mannitol; wherein the stabilizing agent is 2% w/v sucrose; and wherein the surfactant is 0.01% w/v polysorbate-20. In another embodiment, the aforementioned method is provided wherein P¹ comprises a sequence set forth in Table 32. In another embodiment, the aforementioned method is provided wherein the therapeutic peptibody concentration is 30 mg/mL.

[0076] In another embodiment, an aforementioned method is provided wherein the pH buffering agent is 20 mM histidine and wherein the pH is 5.0; wherein the bulking agent is 3.3% w/v mannitol; wherein the stabilizing agent is 2% w/v sucrose; and wherein the surfactant is 0.01% w/v polysorbate-20. In another embodiment, the aforementioned method is provided wherein P¹ comprises a sequence set forth in Table 4. In another embodiment, the aforementioned method is provided wherein the therapeutic peptibody concentration is 100 mg/mL.

[0077] In another embodiment, an aforementioned method is provided wherein the pH buffering agent is 10 mM histidine and wherein the pH is 5.0; wherein the bulking agent is 2.5% w/v mannitol; and wherein the stabilizing agent is 3.5% w/v sucrose. In another embodiment, the aforementioned method is provided wherein P¹ comprises a sequence set forth in Table 31. In another embodiment, the aforementioned method is provided wherein the therapeutic peptibody concentration is 30 mg/mL.

[0078] In another embodiment of the invention, an aforementioned method is provided wherein the composition is selected from the group consisting of: a) 10 mM histidine, pH 4.7, 4% mannitol and 2% sucrose, with and without 0.004% polysorbate-20; b) 10 mM histidine, pH 5, 4% mannitol and 2% sucrose, with and without 0.004% polysorbate-20; c) 10 mM glutamate, pH 4.5, 4% mannitol and 2% sucrose with and without 0.004% polysorbate-20; d) 10 mM succinate, pH 4.5, 4% mannitol and 2% sucrose, 0.004% polysorbate-20; e) 10 mM glutamate, pH 4.5, 9% sucrose, 0.004% polysorbate-20; f) 10 mM glutamate, pH 4.5, 4% mannitol, 2% sucrose, 1% hydroxyethyl starch, 0.004% polysorbate-20; g) 5 mM glutamate, pH 4.5, 2% mannitol, 1% sucrose, 0.004% polysorbate-20; and h) 10 mM glutamate, pH 4.5, 4% mannitol, 2% trehalose, 0.004% polysorbate-20. In another embodiment, the aforementioned method is provided wherein P¹ comprises a sequence set forth in Tables 21-24. In still another embodiment, the aforementioned method is provided wherein the therapeutic peptibody concentration is selected from the group consisting of 1, 30, 85, and 100 mg/mL.

[0079] In another embodiment, an aforementioned method is provided further comprising, prior to lyophilization, the steps of: b) adjusting the pH of the solution to a pH between about 4.0 and about 8.0; c) preparing a solution containing the therapeutic peptibody; d) buffer exchanging the solution of step (c) into the solution of step (b); e) adding an appropriate amount of a surfactant; and f) lyophilizing the mixture from step (e).

[0080] In another embodiment, the aforementioned method is provided wherein a method for preparing a reconstituted therapeutic peptibody composition is provided comprising the steps of: a) lyophilizing an aforementioned therapeutic peptibody composition; and b) reconstituting the lyophilized therapeutic peptibody composition.

[0081] In another embodiment, a kit for preparing an aqueous pharmaceutical composition is provided comprising a first container having an aforementioned lyophilized therapeutic peptibody composition, and a second container having a physiologically acceptable solvent for the lyophilized composition.

### DETAILED DESCRIPTION OF THE INVENTION

### Definition of Terms

[0082] The term “comprising,” with respect to a peptide compound, means that a compound may include additional amino acids on either or both of the amino or carboxy termini of the given sequence. Of course, these additional amino acids should not significantly interfere with the activity of the compound. With respect to a composition of the instant invention, the term “comprising” means that a composition may include additional components. These additional components should not significantly interfere with the activity of the composition.

[0083] The term “peptibody” refers to a molecule comprising peptide(s) fused either directly or indirectly to other molecules such as an Fc domain of an antibody, where the peptide moiety specifically binds to a desired target. The peptide(s) may be fused to either an Fc region or inserted into an Fc-Loop, a modified Fc molecule. Fc-Loops are described in U.S. Patent Application Publication No. US2006/0140934 incorporated herein by reference in its entirety. The invention includes such molecules comprising an Fc domain modified to comprise a peptide as an internal sequence (preferably in a loop region) of the Fc domain. The Fc internal peptide molecules may include more than one peptide sequence in tandem in a particular internal region, and they may include further peptides in other internal regions. While the putative loop regions are exemplified, insertions in any other non-terminal domains of the Fc are also considered part of this invention. The term “peptibody” does not include Fc-fusion proteins (e.g., full length proteins fused to an Fc domain).

[0084] The term “vehicle” refers to a molecule that prevents degradation and/or increases half-life, reduces toxicity, reduces immunogenicity, or increases biological activity of a therapeutic protein. Exemplary vehicles include an Fc domain as described in U.S. Pat. No. 5,428,130 to Capon et al., issued Jun. 27, 1995.

[0085] The term “native Fc” refers to molecule or sequence comprising the sequence of a non-antigen-binding fragment resulting from digestion of whole antibody, whether in monomeric or multimeric form. Typically, a native Fc comprises a CH2 and CH3 domain. The original immunoglobulin source of the native Fc is in one aspect of human origin and may be any of the immunoglobulins. A native Fc is a monomeric polypeptide that may be linked into dimeric or multimeric forms by covalent association (i.e., disulficle bonds), non-covalent association or a combination of both. The number of intermolecular disulfide bonds between monomeric subunits of native Fc molecules ranges from one to four depending on class (e.g., IgG, IgA, IgE) or subclass (e.g., IgG1, IgG2, IgG3, IgA1, IgGA2). One example of a native Fc is a disulfide-bonded dimer resulting from papain digestion of an IgG. Ellison et al. (1982), Nucleic Acids Res. 10: 4071-9. The term “native Fc” as used herein is generic to the monomeric, dimeric, and multimeric forms.

[0086] The term “Fc variant” refers to a molecule or sequence that is modified from a native Fc, but still comprises a binding site for the salvage receptor, FcRn. International applications WO 97/34631 (published 25 Sep. 1997) and WO 96/32478 describe exemplary Fc variants, as well as interaction with the salvage receptor, and are hereby incorporated by reference. In one aspect, the term “Fc variant” comprises a molecule or sequence that is humanized from a non-human native Fc. In another aspect, a native Fc comprises sites that may be removed because they provide structural features or biological activity that are not required for the fusion molecules of the present invention. Thus, the term “Fc variant” comprises a molecule or sequence that lacks one or more native Fc sites or residues that affect or are involved in (1) disulfide bond formation, (2) incompatibility with a selected host cell (3) N-terminal heterogeneity upon expression in a selected host cell, (4) glycosylation, (5) interaction with complement, (6) binding to an Fc receptor other than a salvage receptor, or (7) antibody-dependent cellular cytotoxicity (ADCC). Fc variants are described in further detail hereinafter.

[0087] The term “Fc domain” encompasses native Fc and Fc variant molecules and sequences as defined above. As with Fc variants and native Fcs, the term “Fc domain” includes molecules in monomeric or multimeric form, whether digested from whole antibody or produced by other means. In one embodiment, for example, the Fc region can be:

(SEQ ID NO: 1)

DKTHTCPPCPAPELLGGPSVFLFPPKPKDTLMISRTPEVTCVVVDVSHED
PEVKFNWYVDGVEVHNAKTKPREEQYNSTYRVVSVLTVLHQDWLNGKEYK
CKVSNKALPAPIEKTISKAKGQPREPQVYTLPPSRDELTKNQVSLTCLVK
GFYPSDIAVEWESNGQPENNYKTTPPVLDSDGSFFLYSKLTVDKSRWQQG
NVFSCSVMHEALHNHYTQKSLSLSPGK.

[0088] Additional Fc sequences are known in the art and are contemplated for use in the invention. For example, Fc IgG1 (GenBank Accession No. P01857), Fc IgG2 (GenBank Accession No. P01859), Fc IgG3 (GenBank Accession No. P01860), Fc IgG4 (GenBank Accession No. P01861), Fc IgA1 (GenBank Accession No. P01876), Fc IgA2 (GenBank Accession No. P01877), Fc IgD (GenBank Accession No. P01880), Fc IgM (GenBank Accession No. P01871), and Fc IgE (GenBank Accession No. P01854) are some additional Fc sequences contemplated for use herein.

[0089] Optionally, an N-terminal amino acid sequence may be added to the above sequences (e.g., where expressed in bacteria).

[0090] The term “multimer” as applied to Fc domains or molecules comprising Fc domains refers to molecules having two or more polypeptide chains associated covalently, noncovalently, or by both covalent and non-covalent interactions. IgG molecules typically form dimers; IgM, pentamers; IgD, dimers; and IgA, monomers, dimers, trimers, or tetramers. Multimers may be formed by exploiting the sequence and resulting activity of the native Ig source of the Fc or by derivatizing (as defined below) such a native Fc.

[0091] The terms “derivatizing,” “derivative” or “derivatized” mean processes and resulting compounds in which, for example and without limitation, (1) the compound has a cyclic portion; for example, cross-linking between cysteinyl residues within the compound; (2) the compound is cross-linked or has a cross-linking site; for example, the compound has a cysteinyl residue and thus forms cross-linked dimers in culture or in vivo; (3) one or more peptidyl linkage is replaced by a non-peptidyl linkage; (4) the N-terminus is replaced by —NRR₁, NRC(O)R₁, —NRC(O)OR₁, —NRS(O)₂R₁, —NHC(O)NHR, a succinimide group, or substituted or unsubstituted benzyloxycarbonyl-NH—, wherein R and R₁ and the ring substituents are as defined hereinafter; (5) the C-terminus is replaced by —C(O)R₂ or —NR₃R₄ wherein R₂, R₃ and R₄ are as defined hereinafter; and (6) compounds in which individual amino acid moieties are modified through treatment with agents capable of reacting with selected side chains or terminal residues. Derivatives are further described hereinafter.

[0092] As used herein the term “peptide” refers to molecules of 2, 3, 4, 5, 6, 7, 8, 9, 10, 11, 12, 13, 14, 15, 16, 17, 18, 19, 20, 21, 22, 23, 24, 25, 26, 27, 28, 29, 30, 31, 32, 33, 34, 35, 36, 37, 38, 39, 40, 41, 42, 43, 44, 45, 46, 47, 48, 49, 50, 51, 52, 53, 54, 55, 56, 57, 58, 59, 60, 61, 62, 63, 64, 65, 66, 67, 68, 69, 70, 71, 72, 73, 74, 75, 76, 77, 78, 79, 80, 81, 82, 83, 84, 85, 86, 87, 88, 89, 90, 91, 92, 93, 94, 95, 96, 97, 98, 99, 100 or more amino acids linked by peptide bonds. Peptides typically contain random and/or flexible conformations, such as random coils; and typically lack stable conformations, such as those observed in larger proteins/polypeptides, typically via secondary and tertiary structures. In particular embodiments, numerous size ranges of peptides are contemplated herein, such from about: 3-90, 3-80, 3-70, 3-60, 3-50; 5-90, 5-80, 5-70, 5-60, 5-50, 5-40, 5-30; 10-90, 10-80, 10-70, 10-60, 10-50, 10-40, 10-30; 10-20 amino acids in length, and the like. In further embodiments, the peptides used herein are no more than 100, 90, 80, 70, 60, 50, 40, 30, or 20 amino acids in length. Exemplary peptides may be generated by any of the methods set forth herein, such as carried in a peptide library (e.g., a phage display library), generated by chemical synthesis, derived by digestion of proteins, or generated using recombinant DNA techniques. Peptides include D and L form, either purified or in a mixture of the two forms.

[0093] Additionally, physiologically acceptable salts of the compounds of this invention are also contemplated. By “physiologically acceptable salts” is meant any salts that are known or later discovered to be pharmaceutically acceptable. Some specific examples are: acetate; trifluoroacetate; hydrohalides, such as hydrochloride and hydrobromide; sulfate; citrate; tartrate; glycolate; and oxalate.

[0094] The term “randomized” as used to refer to peptide sequences refers to fully random sequences (e.g., selected by phage display methods) and sequences in which one or more residues of a naturally occurring molecule is replaced by an amino acid residue not appearing in that position in the naturally occurring molecule. Exemplary methods for identifying peptide sequences include phage display, E. coli display, ribosome display, yeast-based screening, RNA-peptide screening, chemical screening, rational design, protein structural analysis, and the like.

[0095] The term “pharmacologically active” means that a substance so described is determined to have activity that affects a medical parameter (e.g., but not limited to blood pressure, blood cell count, cholesterol level) or disease state (e.g., but not limited to cancer, autoimmune disorders). Thus, pharmacologically active peptides comprise agonistic or mimetic and antagonistic peptides as defined below.

[0096] The terms “-mimetic peptide” and “-agonist peptide” refer to a peptide having biological activity comparable to a protein (e.g., but not limited to EPO, TPO, G-CSF and other proteins described herein) that interacts with a protein of interest. These terms further include peptides that indirectly mimic the activity of a protein of interest, such as by potentiating the effects of the natural ligand of the protein of interest; see, for example, the G-CSF-mimetic peptides listed in Tables 2 and 7. As an example, the term “EPO-mimetic peptide” comprises any peptides that can be identified or derived as described in Wrighton et al. (1996), Science 273: 458-63, Naranda et al. (1999), Proc. Natl. Acad. Sci. USA 96: 7569-74, or any other reference in Table 2 identified as having EPO-mimetic subject matter. Those of ordinary skill in the art appreciate that each of these references enables one to select different peptides than actually disclosed therein by following the disclosed procedures with different peptide libraries.

[0097] As another example, the term “TPO-mimetic peptide” or “TMP” refers to peptides that can be identified or derived as described in Cwirla et al. (1997), Science 276: 1696-9, U.S. Pat. Nos. 5,869,451 and 5,932,946 and any other reference in Table 2 identified as having TPO-mimetic subject matter, as well as International application WO 00/24770 published May 4, 2000, hereby incorporated by reference. Those of ordinary skill in the art appreciate that each of these references enables one to select different peptides than actually disclosed therein by following the disclosed procedures with different peptide libraries.

[0098] As another example, the term “G-CSF-mimetic peptide” refers to any peptides that can be identified or described in Paukovits et al. (1984), Hoppe-Seylers Z. Physiol. Chem. 365: 303-11 or any of the references in Table 2 identified as having G-CSF-mimetic subject matter. Those of ordinary skill in the art appreciate that each of these references enables one to select different peptides than actually disclosed therein by following the disclosed procedures with different peptide libraries.

[0099] The term “CTLA4-mimetic peptide” refers to any peptides that can be identified or derived as described in Fukumoto et al. (1998), Nature Biotech. 16: 267-70. Those of ordinary skill in the art appreciate that each of these references enables one to select different peptides than actually disclosed therein by following the disclosed procedures with different peptide libraries.

[0100] The term “-antagonist peptide” or “inhibitor peptide” refers to a peptide that blocks or in some way interferes with the biological activity of the associated protein of interest, or has biological activity comparable to a known antagonist or inhibitor of the associated protein of interest. Thus, the term “TNF-antagonist peptide” comprises peptides that can be identified or derived as described in Takasaki et al. (1997), Nature Biotech. 15: 1266-70 or any of the references in Table 2 identified as having TNF-antagonistic subject matter. Those of ordinary skill in the art appreciate that each of these references enables one to select different peptides than actually disclosed therein by following the disclosed procedures with different peptide libraries.

[0101] The terms “IL-1 antagonist” and “IL-1ra-mimetic peptide” refers to peptides that inhibit or down-regulate activation of the IL-1 receptor by IL-1. IL-1 receptor activation results from formation of a complex among IL-1, IL-1 receptor, and IL-1 receptor accessory protein. IL-1 antagonist or IL-1ra-mimetic peptides bind to IL-1, IL-1 receptor, or IL-1 receptor accessory protein and obstruct complex formation among any two or three components of the complex. Exemplary IL-1 antagonist or IL-1ra-mimetic peptides can be identified or derived as described in U.S. Pat. Nos. 5,608,035; 5,786,331, 5,880,096; or any of the references in Table 2 identified as having IL-1ra-mimetic or IL-1 antagonistic subject matter. Those of ordinary skill in the art appreciate that each of these references enables one to select different peptides than actually disclosed therein by following the disclosed procedures with different peptide libraries.

[0102] The term “VEGF-antagonist peptide” refers to peptides that can be identified or derived as described in Fairbrother (1998), Biochem. 37: 17754-64, and in any of the references in Table 2 identified as having VEGF-antagonistic subject matter. Those of ordinary skill in the art appreciate that each of these references enables one to select different peptides than actually disclosed therein by following the disclosed procedures with different peptide libraries.

[0103] The term “MMP inhibitor peptide” refers to peptides that can be identified or derived as described in Koivunen (1999), Nature Biotech. 17: 768-74 and in any of the references in Table 2 identified as having MMP inhibitory subject matter. Those of ordinary skill in the art appreciate that each of these references enables one to select different peptides than actually disclosed therein by following the disclosed procedures with different peptide libraries.

[0104] The term “myostatin inhibitor peptide” refers to peptides that can be identified by their ability to reduce or block myostatin activity or signaling as demonstrated in in vitro assays such as, for example the pMARE C2C12 cell-based myostatin activity assay or by in vivo animal testing as described in U.S. patent application Publication No US20040181033A1 and PCT application publication No. WO2004/058988. Exemplary myostatin inhibitor peptides are set out in Tables 21-24.

[0105] The term “integrin/adhesion antagonist” refers to peptides that inhibit or down-regulate the activity of integrins, selectins, cell adhesion molecules, integrin receptors, selectin receptors, or cell adhesion molecule receptors. Exemplary integrin/adhesion antagonists comprise laminin, echistatin, the peptides described in Tables 25-28.

[0106] The term “bone resorption inhibitor” refers to such molecules as determined by the assays of Examples 4 and 11 of WO 97/23614: which is hereby incorporated by reference in its entirety. Exemplary bone resorption inhibitors include OPG and OPG-L antibody, which are described in WO 97/23614 and WO98/46751, respectively, which are hereby incorporated by reference in their entirety.

[0107] The term “nerve growth factor inhibitor” or “nerve growth factor agonist” refers to a peptide that binds to and inhibits nerve growth factor (NGF) activity or signaling. Exemplary peptides of this type are set out in Table 29.

[0108] The term “TALL-1 modulating domain” refers to any amino acid sequence that binds to the TALL-1 and comprises naturally occurring sequences or randomized sequences. Exemplary TALL-1 modulating domains can be identified or derived by phage display or other methods mentioned herein. Exemplary peptides of this type are set out in Tables 30 and 31.

[0109] The term “TALL-1 antagonist” refers to a molecule that binds to the TALL-1 and increases or decreases one or more assay parameters opposite from the effect on those parameters by full length native TALL-1. Such activity can be determined, for example, by such assays as described in the subsection entitled “Biological activity of AGP-3” in the Materials & Methods section of the patent application entitled, “TNF-RELATED PROTEINS”, WO 00/47740, published Aug. 17, 2000.

[0110] The term “Ang 2-antagonist peptide” refers to peptides that can be identified or derived as having Ang-2-antagonistic characteristics. Exemplary peptides of this type are set out in Tables 32-38.

[0111] The term “WSP” refers to a water soluble polymer which prevents a peptide, protein or other compound to which it is attached from precipitating in an aqueous environment, such as, by way of example, a physiological environment. A more detailed description of various WSP embodiments contemplated by the invention follows.

### Lyophilization and Administration

[0112] Therapeutic peptibodies are useful in pharmaceutical formulations in order to treat human diseases as described herein. In one embodiment the therapeutic peptibody compositions are lyophilized. Lyophilization is carried out using techniques common in the art and should be optimized for the composition being developed [Tang et al., Pharm Res. 21:191-200, (2004) and Chang et al., Pharm Res. 13:243-9 (1996)].

[0113] A lyophilization cycle is, in one aspect, composed of three steps: freezing, primary drying, and secondary drying [A. P. Mackenzie, Phil Trans R Soc London, Ser B, Biol 278:167 (1977)]. In the freezing step, the solution is cooled to initiate ice formation. Furthermore, this step induces the crystallization of the bulking agent. The ice sublimes in the primary drying stage, which is conducted by reducing chamber pressure below the vapor pressure of the ice, using a vacuum and introducing heat to promote sublimation. Finally, adsorbed or bound water is removed at the secondary drying stage under reduced chamber pressure and at an elevated shelf temperature. The process produces a material known as a lyophilized cake. Thereafter the cake can be reconstituted with either sterile water or suitable diluent for injection.

[0114] The lyophilization cycle not only determines the final physical state of the excipients but also affects other parameters such as reconstitution time, appearance, stability and final moisture content. The composition structure in the frozen state proceeds through several transitions (e.g., glass transitions, wettings, and crystallizations) that occur at specific temperatures and can be used to understand and optimize the lyophilization process. The glass transition temperature (Tg and/or Tg′) can provide information about the physical state of a solute and can be determined by differential scanning calorimetry (DSC). Tg and Tg′ are an important parameter that must be taken-into account when designing the lyophilization cycle. For example, Tg′ is important for primary drying. Furthermore, in the dried state, the glass transition temperature provides information on the storage temperature of the final product.

[0115] Excipients in General

[0116] Excipients are additives that are included in a formulation because they either impart or enhance the stability, delivery and manufacturability of a drug product. Regardless of the reason for their inclusion, excipients are an integral component of a drug product and therefore need to be safe and well tolerated by patients. For protein drugs, the choice of excipients is particularly important because they can affect both efficacy and immunogenicity of the drug. Hence, protein formulations need to be developed with appropriate selection of excipients that afford suitable stability, safety, and marketability.

[0117] A lyophilized formulation is usually comprised of a buffer, a bulking agent, and a stabilizer. The utility of a surfactant may be evaluated and selected in cases where aggregation during the lyophilization step or during reconstitution becomes an issue. An appropriate buffering agent is included to maintain the formulation within stable zones of pH during lyophilization. A comparison of the excipient components in liquid and lyophilized protein formulations is provided in Table A.

TABLE A
Excipient components of lyophilized protein formulations

| | Function in lyophilized |
|---|---|
| Excipient component | formulation |
| Buffer | Maintain pH of formulation |
| | during lyophilization and upon |
| | reconstitution |
| Tonicity agent/stabilizer | Stabilizers include cryo and |
| | lyoprotectants |
| | Examples include Polyols, |
| | sugars and polymers |
| | Cryoprotectants protect |
| | proteins from freezing stresses |
| | Lyoprotectants stabilize |
| | proteins in the freeze-dried state |
| Bulking agent | Used to enhance product |
| | elegance and to prevent blowout |
| | Provides structural strength |
| | to the lyo cake |
| | Examples include mannitol |
| | and glycine |
| Surfactant | Employed if aggregation |
| | during the lyophilization process is |
| | an issue |
| | May serve to reduce |
| | reconstitution times |
| | Examples include |
| | polysorbate 20 and 80 |
| Anti-oxidant | Usually not employed, |
| | molecular reactions in the lyo cake |
| | are greatly retarded |
| Metal ions/chelating agent | May be included if a specific |
| | metal ion is included only as a co- |
| | factor or where the metal is |
| | required for protease activity |
| | Chelating agents are |
| | generally not needed in lyo |
| | formulations |
| Preservative | For multi-dose formulations |
| | only |
| | Provides protection against |
| | microbial growth in formulation |
| | Is usually included in the |
| | reconstitution diluent (e.g. bWFI) |

[0118] The principal challenge in developing formulations for therapeutic proteins is stabilizing the product against the stresses of manufacturing, shipping and storage. The role of formulation excipients is to provide stabilization against these stresses. Excipients may also be employed to reduce viscosity of high concentration protein formulations in order to enable their delivery and enhance patient convenience. In general, excipients can be classified on the basis of the mechanisms by which they stabilize proteins against various chemical and physical stresses. Some excipients are used to alleviate the effects of a specific stress or to regulate a particular susceptibility of a specific protein. Other excipients have more general effects on the physical and covalent stabilities of proteins. The excipients described herein are organized either by their chemical type or their functional role in formulations. Brief descriptions of the modes of stabilization are provided when discussing each excipient type.

[0119] Given the teachings and guidance provided herein, those skilled in the art will know what amount or range of excipient can be included in any particular formulation to achieve a biopharmaceutical formulation of the invention that promotes retention in stability of the biopharmaceutical. For example, the amount and type of a salt to be included in a biopharmaceutical formulation of the invention can be selected based on to the desired osmolality (i.e., isotonic, hypotonic or hypertonic) of the final solution as well as the amounts and osmolality of other components to be included in the formulation. Similarly, by exemplification with reference to the type of polyol or sugar included in a formulation, the amount of such an excipient will depend on its osmolality.

[0120] By way of example, inclusion of about 5% sorbitol can achieve isotonicity while about 9% of a sucrose excipient is needed to achieve isotonicity. Selection of the amount or range of concentrations of one or more excipients that can be included within a biopharmaceutical formulation of the invention has been exemplified above by reference to salts, polyols and sugars. However, those skilled in the art will understand that the considerations described herein and further exemplified by reference to specific excipients are equally applicable to all types and combinations of excipients including, for example, salts, amino acids, other tonicity agents, surfactants, stabilizers, bulking agents, cryoprotectants, lyoprotectants, anti-oxidants, metal ions, chelating agents and/or preservatives.

[0121] Further, where a particular excipient is reported in a formulation by, e.g., percent (%) w/v, those skilled in the art will recognize that the equivalent molar concentration of that excipient is also contemplated.

[0122] Of course, a person having ordinary skill in the art would recognize that the concentrations of the aforementioned excipients share an interdependency within a particular formulation. By way of example, the concentration of a bulking agent may be lowered where, e.g., there is a high protein/peptide concentration or where, e.g., there is a high stabilizing agent concentration. In addition, a person having ordinary skill in the art would recognize that, in order to maintain the isotonicity of a particular formulation in which there is no bulking agent, the concentration of a stabilizing agent would be adjusted accordingly (i.e., a “tonicifying” amount of stabilizer would be used). Other excipients are known in the art and can be found in Powell et al., Compendium of Excipients fir Parenteral Formulations (1998), PDA J. Pharm. Sci. Technology, 52:238-311.

[0123] Buffers

[0124] The stability of a protein drug is usually observed to be maximal in a narrow pH range. This pH range of optimal stability needs to be identified early during pre-formulation studies. Several approaches such as accelerated stability studies and calorimetric screening studies have been demonstrated to be useful in this endeavor (Remmele R. L. Jr., et al., Biochemistry, 38(16): 5241-7 (1999)). Once a formulation is finalized, the drug product must be manufactured and maintained within a predefined specification throughout its shelf-life. Hence, buffering agents are almost always employed to control pH in the formulation.

[0125] Organic acids, phosphates and Tris have been employed routinely as buffers in protein formulations (Table B). The buffer capacity of the buffering species is maximal at a pH equal to the pKa and decreases as pH increases or decreases away from this value. Ninety percent of the buffering capacity exists within one pH unit of its pKa. Buffer capacity also increases proportionally with increasing buffer concentration.

[0126] Several factors need to be considered when choosing a buffer. First and foremost, the buffer species and its concentration need to be defined based on its pKa and the desired formulation pH. Equally important is to ensure that the buffer is compatible with the protein drug, other formulation excipients, and does not catalyze any degradation reactions. Recently, polyanionic carboxylate buffers such as citrate and succinate have been shown to form covalent adducts with the side chain residues of proteins. A third important aspect to be considered is the sensation of stinging and irritation the buffer may induce. For example, citrate is known to cause stinging upon injection (Laursen T, et al., Basic Clin Pharmacol Toxicol., 98(2): 218-21 (2006)). The potential for stinging and irritation is greater for drugs that are administered via the SC or IM routes, where the drug solution remains at the site for a relatively longer period of time than when administered by the IV route where the formulation gets diluted rapidly into the blood upon administration. For formulations that are administered by direct IV infusion, the total amount of buffer (and any other formulation component) needs to be monitored. One has to be particularly careful about potassium ions administered in the form of the potassium phosphate buffer, which can induce cardiovascular effects in a patient (Hollander-Rodriguez J C, et al., Am. Fam. Physician., 73(2): 283-90 (2006)).

[0127] Buffers for lyophilized formulations need additional consideration. Some buffers like sodium phosphate can crystallize out of the protein amorphous phase during freezing resulting in rather large shifts in pH. Other common buffers such as acetate and imidazole should be avoided since they may sublime or evaporate during the lyophilization process, thereby shifting the pH of formulation during lyophilization or after reconstitution.

TABLE B
Commonly used buffering agents and their pKₐ values

| Buffer | pKₐ | Example drug product |
|---|---|---|
| Acetate | 4.8 | Neupogen, Neulasta |
| Succinate | pKₐ₁ = 4.8, pKₐ₂ = 5.5 | Actimmune |
| Citrate | pKₐ₁ = 3.1, pKₐ₂ = 4.8, | Humira |
| | pKₐ₃ = 6.4 | |
| Histidine | 6.0 | Xolair |
| (imidazole) | | |
| phosphate | pKₐ₁ = 2.15, pKₐ₂ = 7.2, | Enbrel (liquid formulation) |
| | pKₐ₃ = 12.3 | |
| Tris | 8.1 | Leukine |

[0128] The buffer system present in the compositions is selected to be physiologically compatible and to maintain a desired pH in the reconstituted solution as well as in the solution before lyophilization. In one embodiment, the pH of the solution prior to lyophilization is between pH 2.0 and pH 12.0. For example, in one embodiment the pH of the solution prior to lyophilization is 2.0, 2.3, 2.5, 2.7, 3.0, 3.3, 3.5, 3.7, 4.0, 4.3, 4.5, 4.7, 5.0, 5.3, 5.5, 5.7, 6.0, 6.3, 6.5, 6.7, 7.0, 7.3, 7.5, 7.7, 8.0, 8.3, 8.5, 8.7, 9.0, 9.3, 9.5, 9.7, 10.0, 10.3, 10.5, 10.7, 11.0, 11.3, 11.5, 11.7, or 12.0. In another embodiment, the pH of the reconstituted solution is between 4.5 and 9.0. In one embodiment, the pH in the reconstituted solution is 4.5, 4.7, 5.0, 5.3, 5.5, 5.7, 6.0, 6.3, 6.5, 6.7, 7.0, 7.3, 7.5, 7.7, 8.0, 8.3, 8.5, 8.7, or 9.0.

[0129] In one embodiment, the pH buffering agent used in the formulation is an amino acid or mixture of amino acids. In one aspect, the pH buffering agent is histidine or a mixture of amino acids one of which is histidine.

[0130] The pH buffering compound may be present in any amount suitable to maintain the pH of the formulation at a predetermined level. In one embodiment, when the pH buffering agent is an amino acid, the concentration of the amino acid is between 0.1 mM and 1000 mM (1 M). In one embodiment, the pH buffering agent is at least 0.1, 0.5, 0.7, 0.8 0.9, 1.0, 1.2, 1.5, 1.7, 2, 3, 4, 5, 6, 7, 8, 9, 10, 11, 12, 13, 14, 15, 16, 17, 18, 19, 20, 30, 40, 50, 60, 70, 80, 90, 100, 200, 500, 700, or 900 mM. In another embodiment, the concentration of the pH buffering agent is between 1, 1.2, 1.5, 1.7, 2, 3, 4, 5, 6, 7, 8, 9, 10, 11, 12, 13, 14, 15, 16, 17, 18, 19, 20, 30, 40, 50, 60, 70, 80, or 90 mM and 100 mM. In still another embodiment, the concentration of the pH buffering agent is between 5, 6, 7, 8, 9, 10, 11, 12, 13, 14, 15, 16, 17, 18, 19, 20, 30, or 40 mM and 50 mM. In yet another embodiment, the concentration of the pH buffering agent is 10 mM.

[0131] Other exemplary pH buffering agents used to buffer the formulation as set out herein include, but are not limited to glycine, histidine, glutamate, succinate, phosphate, acetate, and aspartate.

[0132] Stabilizers and Bulking Agents

[0133] Bulking agents are typically used in lyophilized formulations to enhance product elegance and to prevent blowout. Conditions in the formulation are generally designed so that the bulking agent crystallizes out of the frozen amorphous phase (either during freezing or annealing above the Tg′) giving the cake structure and bulk. Mannitol and glycine are examples of commonly used bulking agents.

[0134] Stabilizers include a class of compounds that can serve as cryoprotectants, lyoprotectants, and glass forming agents. Cryoprotectants act to stabilize proteins during freezing or in the frozen state at low temperatures (P. Cameron, ed., Good Pharmaceutical Freeze-Drying Practice, Interpharm Press, Inc., Buffalo Grove, Ill., (1997)). Lyoprotectants stabilize proteins in the freeze-dried solid dosage form by preserving the native-like conformational properties of the protein during dehydration stages of freeze-drying. Glassy state properties have been classified as “strong” or “fragile” depending on their relaxation properties as a function of temperature. It is important that cryoprotectants, lyoprotectants, and glass forming agents remain in the same phase with the protein in order to impart stability. Sugars, polymers, and polyols fall into this category and can sometimes serve all three roles.

[0135] Polyols encompass a class of excipients that includes sugars, (e.g. mannitol, sucrose, sorbitol), and other polyhydric alcohols (e.g., glycerol and propylene glycol). The polymer polyethylene glycol (PEG) is included in this category. Polyols are commonly used as stabilizing excipients and/or isotonicity agents in both liquid and lyophilized parenteral protein formulations. With respect to the Hofineister series, the polyols are kosmotropic and are preferentially excluded from the protein surface. Polyols can protect proteins from both physical and chemical degradation pathways. Preferentially excluded co-solvents increase the effective surface tension of solvent at the protein interface whereby the most energetically favorable protein conformations are those with the smallest surface areas.

[0136] Mannitol is a popular bulking agent in lyophilized formulations because it crystallizes out of the amorphous protein phase during freeze-drying lending structural stability to the cake (e.g. Leukine®, Enbrel®—Lyo, Betaseron®). It is generally used in combination with a cryo and/or lyoprotectant like sucrose. Because of the propensity of mannitol to crystallize under frozen conditions, sorbitol and sucrose are the preferred tonicity agents/stabilizers in liquid formulations to protect the product against freeze-thaw stresses encountered during transport or when freezing bulk prior to manufacturing. Sorbitol and sucrose are far more resistant to crystallization and therefore less likely to phase separate from the protein. It is interesting to note that while mannitol has been used in tonicifying amounts in several marketed liquid formulations such as Actimmune®, Forteo®, and Rebif®, the product labels of these drugs carry a ‘Do Not Freeze’ warning. The use of reducing sugars (containing free aldehyde or ketone groups) such as glucose and lactose should be avoided because they can react and glycate surface lysine and arginine residues of proteins via the Maillard reaction of aldehydes and primary amines (Chevalier F, et al., Nahrung, 46(2): 58-63 (2002); Humeny A, et al., J Agric Food Chem. 50(7): 2153-60 (2002)). Sucrose can hydrolyze to fructose and glucose under acidic conditions (Kautz C. F. and Robinson A. L., JACS, 50(4) 1022-30 (1928)), and consequently may cause glycation.

[0137] The polymer polyethylene glycol (PEG) could stabilize proteins by two different temperature dependent mechanisms. At lower temperatures, it is preferentially excluded from the protein surface but has been shown to interact with the unfolded form of the protein at higher temperature given its amphipathic nature (Lee L. L., and Lee J. C., Biochemistry, 26(24): 7813-9 (1987)). Thus at lower temperatures it may protect proteins via the mechanism of preferential exclusion, but at higher temperatures possibly by reducing the number of productive collisions between unfolded molecules. PEG is also a cryoprotectant and has been employed in Recombinate®, a lyophilized formulation of recombinant Antihemophilic Factor, which utilizes PEG 3350 at a concentration of 1.5 mg/mL. The low molecular weight liquid PEGs (PEG 300-600) can be contaminated with peroxides and cause protein oxidation. If used, the peroxide content in the raw material must be minimized and controlled throughout its shelf-life. The same holds true for polysorbates.

[0138] In a particular embodiment of the present compositions, a stabilizer (or a combination of stabilizers) is added to the lyophilization formulation to prevent or reduce lyophilization-induced or storage-induced aggregation and chemical degradation. A hazy or turbid solution upon reconstitution indicates that the protein has precipitated. The term “stabilizer” means an excipient capable of preventing aggregation or other physical degradation, as well as chemical degradation (for example, autolysis, deamidation, oxidation, etc.) in an aqueous and solid state. Stabilizers that are conventionally employed in pharmaceutical compositions include, but are not limited to, sucrose, trehalose, mannose, maltose, lactose, glucose, raffinose, cellobiose, gentiobiose, isomaltose, arabinose, glucosamine, fructose, mannitol, sorbitol, glycine, arginine HCL, poly-hydroxy compounds, including polysaccharides such as dextran, starch, hydroxyethyl starch, cyclodextrins, N-methylpyrollidene, cellulose and hyaluronic acid, sodium chloride, [Carpenter et al., Develop. Biol. Standard 74:225, (1991)]. In one embodiment, the stabilizer is incorporated in a concentration of about 0% to about 40% w/v. In another embodiment, the stabilizer is incorporated in a concentration of at least 0.5, 1, 2, 3, 4, 5, 6, 7, 8, 9, 10, 11, 12, 13, 14, 15, 16, 17, 18, 19, 20, 30, or 40% w/v. In another embodiment, the stabilizer is incorporated in a concentration of about 1, 2, 3, 4, 5, 6, 7, 8, 9% to about 10% w/v. In still another embodiment, the stabilizer is incorporated in a concentration of about 2% to about 4% w/v. In yet another embodiment, the stabilizer is incorporated in a concentration of about 2% W/V.

[0139] If desired, the lyophilized compositions also include appropriate amounts of bulking and osmolarity regulating agents suitable for forming a lyophilized “cake”. Bulking agents may be either crystalline (for example, mannitol, glycine) or amorphous (for example, sucrose, polymers such as dextran, polyvinylpyrolidone, carboxymethylcellulose). Other exemplary bulking agents include lactose, sorbitol, trehalose, or xylitol. In one embodiment, the bulking agent is mannitol. In a further embodiment, the bulking agent is incorporated in a concentration of about 0% to about 10% w/v. In another embodiment, the bulking agent is incorporated in a concentration of at least 0.2, 0.5, 0.7, 1.0, 1.5, 2.0, 2.5, 3.0, 3.5, 4.0, 4.5, 5.0, 5.5, 6.0, 6.5, 7.0, 7.5, 8.0, 8.5, 9.0, or 9.5% w/v. In a yet further embodiment in a concentration of about 1, 1.5, 2.0, 2.5, 3.0, 3.5, 4.0, 4.5% to 5.0% w/v, to produce a mechanically and pharmaceutically stable and elegant cake. In another embodiment, the mannitol concentration is 4% w/v.

[0140] Surfactants

[0141] Protein molecules have a high propensity to interact with surfaces making them susceptible to adsorption and denaturation at air-liquid, vial-liquid, and liquid-liquid (silicone oil) interfaces. This degradation pathway has been observed to be inversely dependent on protein concentration and result in either the formation of soluble and insoluble protein aggregates or the loss of protein from solution via adsorption to surfaces. In addition to container surface adsorption, surface-induced degradation is exacerbated with physical agitation, as would be experienced during shipping and handling of the product.

[0142] Surfactants are commonly used in protein formulations to prevent surface-induced degradation. Surfactants are amphipathic molecules with the capability of out-competing proteins for interfacial positions. Hydrophobic portions of the surfactant molecules occupy interfacial positions (e.g., air/liquid), while hydrophilic portions of the molecules remain oriented towards the bulk solvent. At sufficient concentrations (typically around the detergent's critical micellar concentration), a surface layer of surfactant molecules serve to prevent protein molecules from adsorbing at the interface. Thereby, surface-induced degradation is minimized. The most commonly used surfactants are fatty acid esters of sorbitan polyethoxylates, i.e. polysorbate 20 and polysorbate 80 (e.g., Avonex®, Neupogen®, Neulasta®). The two differ only in the length of the aliphatic chain that imparts hydrophobic character to the molecules, C-12 and C-18, respectively. Accordingly, polysorbate-80 is more surface-active and has a lower critical micellar concentration than polysorbate-20. The surfactant poloxamer 188 has also been used in several marketed liquid products such Gonal-F®, Norditropin®, and Ovidrel®.

[0143] Detergents can also affect the thermodynamic conformational stability of proteins. Here again, the effects of a given excipient will be protein specific. For example, polysorbates have been shown to reduce the stability of some proteins and increase the stability of others. Detergent destabilization of proteins can be rationalized in terms of the hydrophobic tails of the detergent molecules that can engage in specific binding with partially or wholly unfolded protein states. These types of interactions could cause a shift in the conformational equilibrium towards the more expanded protein states (i.e. increasing the exposure of hydrophobic portions of the protein molecule in complement to binding polysorbate). Alternatively, if the protein native state exhibits some hydrophobic surfaces, detergent binding to the native state may stabilize that conformation.

[0144] Another aspect of polysorbates is that they are inherently susceptible to oxidative degradation. Often, as raw materials, they contain sufficient quantities of peroxides to cause oxidation of protein residue side-chains, especially methionine. The potential for oxidative damage arising from the addition of stabilizer emphasizes the point that the lowest effective concentrations of excipients should be used in formulations. For surfactants, the effective concentration for a given protein will depend on the mechanism of stabilization. It has been postulated that if the mechanism of surfactant stabilization is related to preventing surface-denaturation the effective concentration will be around the detergent's critical micellar concentration. Conversely, if the mechanism of stabilization is associated with specific protein-detergent interactions, the effective surfactant concentration will be related to the protein concentration and the stoichiometry of the interaction (Randolph T. W., et al., Pharm Biotechnol., 13:159-75 (2002)).

[0145] Surfactants may also be added in appropriate amounts to prevent surface related aggregation phenomenon during freezing and drying [Chang, B, J. Pharm. Sci. 85:1325, (1996)]. Exemplary surfactants include anionic, cationic, nonionic, zwitterionic, and amphoteric surfactants including surfactants derived from naturally-occurring amino acids. Anionic surfactants include, but are not limited to, sodium lauryl sulfate, dioctyl sodium sulfosuccinate and dioctyl sodium sulfonate, chenodeoxycholic acid, N-lauroylsarcosine sodium salt, lithium dodecyl sulfate, 1-octanesulfonic acid sodium salt, sodium cholate hydrate, sodium deoxycholate, and glycodeoxycholic acid sodium salt. Cationic surfactants include, but are not limited to, benzalkonium chloride or benzethonium chloride, cetylpyridinium chloride monohydrate, and hexadecyltrimethylammonium bromide. Zwitterionic surfactants include, but are not limited to, CHAPS, CHAPSO, SB3-10, and SB3-12. Non-ionic surfactants include, but are not limited to, digitonin, Triton X-100, Triton X-114, TWEEN-20, and TWEEN-80. In another embodiment, surfactants include lauromacrogol 400, polyoxyl 40 stearate, polyoxyethylene hydrogenated castor oil 10, 40, 50 and 60, glycerol monostearate, polysorbate 40, 60, 65 and 80, soy lecithin and other phospholipids such as DOPC, DMPG, DMPC, and DOPG; sucrose fatty acid ester, methyl cellulose and carboxymethyl cellulose. Compositions comprising these surfactants, either individually or as a mixture in different ratios, are therefore further provided. In one embodiment, the surfactant is incorporated in a concentration of about 0% to about 5% w/v. In another embodiment, the surfactant is incorporated in a concentration of at least 0.001, 0.002, 0.005, 0.007, 0.01, 0.05, 0.1, 0.2, 0.3, 0.4, 0.5, 0.6, 0.7, 0.7, 0.8, 0.9, 1.0, 1.5, 2.0, 2.5, 3.0, 3.5, 4.0, or 4.5% w/v. In another embodiment, the surfactant is incorporated in a concentration of about 0.001% to about 0.5% w/v. In still another embodiment, the surfactant is incorporated in a concentration of about 0.004, 0.005, 0.007, 0.01, 0.05, or 0.1% w/v to about 0.2% w/v. In yet another embodiment, the surfactant is incorporated in a concentration of about 0.01% to about 0.1% w/v.

[0146] Salts

[0147] Salts are often added to increase the ionic strength of the formulation, which can be important for protein solubility, physical stability, and isotonicity. Salts can affect the physical stability of proteins in a variety of ways. Ions can stabilize the native state of proteins by binding to charged residues on the protein's surface. Alternatively, they can stabilize the denatured state by binding to the peptide groups along the protein backbone (—CONH—). Salts can also stabilize the protein native conformation by shielding repulsive electrostatic interactions between residues within a protein molecule. Electrolytes in protein formulations can also shield attractive electrostatic interactions between protein molecules that can lead to protein aggregation and insolubility.

[0148] The effect of salt on the stability and solubility of proteins varies significantly with the characteristics of the ionic species. The Hofineister series originated in the 1880's as a way to rank order electrolytes based on their ability to precipitate proteins (Cacace M. G., et al., Quarterly Reviews of Biophysics., 30(3): 241-277 (1997)). In this report, the Hofmeister series is used to illustrate a scale of protein stabilization effects by ionic and non-ionic co-solutes. In Table C, co-solutes are ordered with respect to their general effects on solution state proteins, from stabilizing (kosmotropic) to destabilizing (chaotropic). In general, the differences in effects across the anions are far greater than that observed for the cations, and, for both types, the effects are most apparent at higher concentrations than are acceptable in parenteral formulations. High concentrations of kosmotropes (e.g., >1 molar ammonium sulfate) are commonly used to precipitate proteins from solution by a process called ‘salting-out’ where the kosmotrope is preferentially excluded from the protein surface reducing the solubility of the protein in it's native (folded) conformation. Removal or dilution of the salt will return the protein to solution. The term ‘salting-in’ refers to the use of destabilizing ions (e.g., like guanidine and chloride) that increase the solubility of proteins by solvating the peptide bonds of the protein backbone. Increasing concentrations of the chaotrope will favor the denatured (unfolded) state conformation of the protein as the solubility of the peptide chain increases. The relative effectiveness of ions to ‘salt-in’ and ‘salt-out’ defines their position in the Hofmeister series.

[0149] In order to maintain isotonicity in a parenteral formulation, salt concentrations are generally limited to less than 150 mM for monovalent ion combinations. In this concentration range, the mechanism of salt stabilization is probably due to screening of electrostatic repulsive intramolecular forces or attractive intermolecular forces (Debye-Huckel screening). Interestingly, chaotropic salts have been shown to be more effective at stabilizing the protein structure than similar concentrations of kosmotropes by this mechanism. The chaotropic anions are believed to bind more strongly than the kosmotropic ions. With respect to covalent protein degradation, differential effects of ionic strength on this mechanism are expected through Debye-Huckel theory. Accordingly, published reports of protein stabilization by sodium chloride are accompanied by those where sodium chloride accelerated covalent degradation. The mechanisms by which salts affect protein stability are protein specific and may vary significantly as a function of solution pH. An example where an excipient can be useful in enabling the delivery of a protein drug is that of some high concentration antibody formulations. Recently; salts have been shown to be effective in reducing the viscosity of such formulations (Liu J., et al., J. Pharm Sci., 94(9): 1928-40 (2005); Erratum in: J. Pharm Sci., 95(1): 234-5. (2006)).

TABLE C
The Hofmeister series of salts

[chemical structure]

[0150] Amino Acids

[0151] Amino acids have found versatile use in protein formulations as buffers, bulking agents, stabilizers and antioxidants. Histidine and glutamic acid are employed to buffer protein formulations in the pH range of 5.5-6.5 and 4.0-5.5 respectively. The imidazole group of histidine has a pKa=6.0 and the carboxyl group of glutamic acid side chain has a pKₐ of 4.3 which makes them suitable for buffering in their respective pH ranges. Acetate, the most commonly used buffer in the acidic pH range of 4.0-5.5, sublimates during lyophilization and hence should not be used in freeze-dried formulations. Glutamic acid is particularly useful in such cases (e.g., Stemgen®). Histidine is commonly found in marketed protein formulations (e.g., Xolair®, Herceptin®, Recombinate®). It provides a good alternative to citrate, a buffer known to sting upon injection. Interestingly, histidine has also been reported to have a stabilizing effect on ABX-IL8 (an IgG2 antibody) with respect to aggregation when used at high concentrations in both liquid and lyophilized presentations (Chen B, et al., Pharm Res., 20(12): 1952-60 (2003)). Histidine (up to 60 mM) was also observed to reduce the viscosity of a high concentration formulation of this antibody. However, in the same study, the authors observed increased aggregation and discoloration in histidine containing formulations during freeze-thaw studies of the antibody in stainless steel containers. The authors attributed this to an effect of iron ions leached from corrosion of steel containers. Another note of caution with histidine is that it undergoes photo-oxidation in the presence of metal ions (Tomita M, et al., Biochemistry, 8(12): 5149-60 (1969)). The use of methionine as an antioxidant in formulations appears promising; it has been observed to be effective against a number of oxidative stresses (Lam X M, et al., J Pharm Sci., 86(11): 1250-5 (1997)).

[0152] The amino acids glycine, proline, serine and alanine have been shown to stabilize proteins by the mechanism of preferential exclusion. Glycine is also a commonly used bulking agent in lyophilized formulations (e.g., Neumega®, Genotropin®, Humatrope®). It crystallizes out of the frozen amorphous phase giving the cake structure and bulk. Arginine has been shown to be an effective agent in inhibiting aggregation and has been used in both liquid and lyophilized formulations (e.g., Activase®, Avonex®, Enbrel® liquid). Furthermore, the enhanced efficiency of refolding of certain proteins in the presence of arginine has been attributed to its suppression of the competing aggregation reaction during refolding.

[0153] Antioxidants

[0154] Oxidation of protein residues arises from a number of different sources. Beyond the addition of specific antioxidants, the prevention of oxidative protein damage involves the careful control of a number of factors throughout the manufacturing process and storage of the product such as atmospheric oxygen, temperature, light exposure, and chemical contamination. The most commonly used pharmaceutical antioxidants are reducing agents, oxygen/free-radical scavengers, or chelating agents. Antioxidants in therapeutic protein formulations must be water-soluble and remain active throughout the product shelf-life. Reducing agents and oxygen/free-radical scavengers work by ablating active oxygen species in solution. Chelating agents such as EDTA can be effective by binding trace metal contaminants that promote free-radical formation. For example, EDTA was utilized in the liquid formulation of acidic fibroblast growth factor to inhibit the metal ion catalyzed oxidation of cysteine residues. EDTA has been used in marketed products like Kineret® and Ontak®.

[0155] In addition to evaluating the effectiveness of various excipients at preventing protein oxidation, formulation scientists must be aware of the potential for the antioxidants themselves to induce other covalent or physical changes to the protein. A number of such cases have been reported in the literature. Reducing agents (like glutathione) can cause disruption of intramolecular disulfide linkages, which can lead to disulfide shuffling. In the presence of transition metal ions, ascorbic acid and EDTA have been shown to promote methionine oxidation in a number of proteins and peptides (Akers M J, and Defelippis M R. Peptides and Proteins as Parenteral Solutions. In: Pharmaceutical Formulation Development of Peptides and Proteins. Sven Frokjaer, Lars Hovgaard, editors. Pharmaceutical Science. Taylor and Francis, U K (1999)); Fransson J. R., J. Pharm. Sci. 86(9): 4046-1050 (1997); Yin J, et al., Pharm Res., 21(12): 2377-83 (2004)). Sodium thiosulfate has been reported to reduce the levels of light and temperature induced methionine-oxidation in rhuMab HER2; however, the formation of a thiosulfate-protein adduct was also reported in this study (Lam X M, Yang J Y, et al., J Pharm Sci. 86(11): 1250-5 (1997)). Selection of an appropriate antioxidant is made according to the specific stresses and sensitivities of the protein.

[0156] Metal Ions

[0157] In general, transition metal ions are undesired in protein formulations because they can catalyze physical and chemical degradation reactions in proteins. However, specific metal ions are included in formulations when they are co-factors to proteins and in suspension formulations of proteins where they form coordination complexes (e.g., zinc suspension of insulin). Recently, the use of magnesium ions (10-120 mM) has been proposed to inhibit the isomerization of aspartic acid to isoaspartic acid (WO 2004039337).

[0158] Two examples where metal ions confer stability or increased activity in proteins are human deoxyribonuclease (rhDNase, Pulmozyme®), and Factor VIII. In the case of rhDNase, Ca⁺² ions (up to 100 mM) increased the stability of the enzyme through a specific binding site (Chen B, et al., J Pharm Sci., 88(4): 477-82 (1999)). In fact, removal of calcium ions from the solution with EGTA caused an increase in deamidation and aggregation. However, this effect was observed only with Ca⁺² ions; other divalent cations —Mg⁺², Mn⁺² and Zn⁺² were observed to destabilize rhDNase. Similar effects were observed in Factor VIII. Ca⁺² and Sr⁺² ions stabilized the protein while others like Mg⁺², Mn⁺² and Zn⁺², Cu⁺² and Fe⁺2 destabilized the enzyme (Fatouros, A., et al., Int. J. Pharm., 155, 121-131 (1997). In a separate study with Factor VIII, a significant increase in aggregation rate was observed in the presence of Al⁺³ ions (Derrick T S, et al., J. Pharm. Sci., 93(10): 2549-57 (2004)). The authors note that other excipients like buffer salts are often contaminated with Al⁺³ ions and illustrate the need to use excipients of appropriate quality in formulated products.

[0159] Preservatives

[0160] Preservatives are necessary when developing multi-use parenteral formulations that involve more than one extraction from the same container. Their primary function is to inhibit microbial growth and ensure product sterility throughout the shelf-life or term of use of the drug product. Commonly used preservatives include benzyl alcohol, phenol and m-cresol. Although preservatives have a long history of use, the development of protein formulations that includes preservatives can be challenging. Preservatives almost always have a destabilizing effect (aggregation) on proteins, and this has become a major factor in limiting their use in multi-dose protein formulations (Roy S, et al., J Pharm Sci., 94(2): 382-96 (2005)).

[0161] To date, most protein drugs have been formulated for single-use only. However, when multi-dose formulations are possible, they have the added advantage of enabling patient convenience, and increased marketability. A good example is that of human growth hormone (hGH) where the development of preserved formulations has led to commercialization of more convenient, multi-use injection pen presentations. At least four such pen devices containing preserved formulations of hGH are currently available on the market. Norditropin® (liquid, Novo Nordisk), Nutropin AQ® (liquid, Genentech) & Genotropin (lyophilized—dual chamber cartridge, Pharmacia & Upjohn) contain phenol while Somatrope® (Eli Lilly) is formulated with m-cresol.

[0162] Several aspects need to be considered during the formulation development of preserved dosage forms. The effective preservative concentration in the drug product must be optimized. This requires testing a given preservative in the dosage form with concentration ranges that confer anti-microbial effectiveness without compromising protein stability. For example, three preservatives were successfully screened in the development of a liquid formulation for interleukin-1 receptor (Type I), using differential scanning calorimetry (DSC). The preservatives were rank ordered based on their impact on stability at concentrations commonly used in marketed products (Remmele R L Jr., et al., Pharm Res., 15(2): 200-8 (1998)).

[0163] As might be expected, development of liquid formulations containing preservatives are more challenging than lyophilized formulations. Freeze-dried products can be lyophilized without the preservative and reconstituted with a preservative containing diluent at the time of use. This shortens the time for which a preservative is in contact with the protein significantly minimizing the associated stability risks. With liquid formulations, preservative effectiveness and stability have to be maintained over the entire product shelf-life (˜18-24 months). An important point to note is that preservative effectiveness has to be demonstrated in the final formulation containing the active drug and all excipient components.

[0164] Some preservatives can cause injection site reactions, which is another factor that needs consideration when choosing a preservative. In clinical trials that focused on the evaluation of preservatives and buffers in Norditropin, pain perception was observed to be lower in formulations containing phenol and benzyl alcohol as compared to a formulation containing m-cresol (Kappelgaard A. M., Horm Res. 62 Suppl 3:98-103 (2004)). Interestingly, among the commonly used preservative, benzyl alcohol possesses anesthetic properties (Minogue S C, and Sun D A., Anesth Analg., 100(3): 683-6 (2005)).

[0165] Given the teachings and guidance provided herein, those skilled in the art will know what amount or range of excipient can be included in any particular formulation to achieve a biopharmaceutical formulation of the invention that promotes retention in stability of the biopharmaceutical. For example, the amount and type of a salt to be included in a biopharmaceutical formulation of the invention can be selected based on to the desired osmolality (i.e., isotonic, hypotonic or hypertonic) of the final solution as well as the amounts and osmolality of other components to be included in the formulation. Similarly, by exemplification with reference to the type of polyol or sugar included in a formulation, the amount of such an excipient will depend on its osmolality.

[0166] By way of example, inclusion of about 5% sorbitol can achieve isotonicity while about 9% of a sucrose excipient is needed to achieve isotonicity. Selection of the amount or range of concentrations of one or more excipients that can be included within a biopharmaceutical formulation of the invention has been exemplified above by reference to salts, polyols and sugars. However, those skilled in the art will understand that the considerations described herein and further exemplified by reference to specific excipients are equally applicable to all types and combinations of excipients including, for example, salts, amino acids, other tonicity agents, surfactants, stabilizers, bulking agents, cryoprotectants, lyoprotectants, anti-oxidants, metal ions, chelating agents and/or preservatives.

[0167] Further, where a particular excipient is reported in a formulation by, e.g., percent (%) w/v, those skilled in the art will recognize that the equivalent molar concentration of that excipient is also contemplated.

[0168] Of course, a person having ordinary skill in the art would recognize that the concentrations of the aforementioned excipients share an interdependency within a particular formulation. By way of example, the concentration of a bulking agent may be lowered where, e.g., there is a high protein/peptide concentration or where, e.g., there is a high stabilizing agent concentration. In addition, a person having ordinary skill in the art would recognize that, in order to maintain the isotonicity of a particular formulation in which there is no bulking agent, the concentration of a stabilizing agent would be adjusted accordingly (i.e., a “tonicifying” amount of stabilizer would be used).

[0169] The compositions are stable for at least two years at 2° C. to 8° C. in the lyophilized state. This long-term stability is beneficial for extending the shelf life of the pharmaceutical product.

[0170] Methods of Preparation

[0171] The present invention further contemplates methods for the preparation of therapeutic protein formulations. In one aspect, methods for preparing a lyophilized therapeutic peptibody formulation comprising the step of lyophilizing a therapeutic peptibody composition in a buffer comprising a buffering agent, a bulking agent, a stabilizing agent and a surfactant;

[0172] The present methods further comprise one or more of the following steps: adding a stabilizing agent to said mixture prior to lyophilizing, adding at least one agent selected from a bulking agent, an osmolarity regulating agent, and a surfactant to said mixture prior to lyophilization. The bulking agent may be any bulking agent described herein. In one aspect, the bulking agent is mannitol. In another embodiment, the stabilizing agent is sucrose. The surfactant may be any surfactant described herein. In one embodiment, the surfactant is polysorbate-20.

[0173] The standard reconstitution practice for lyophilized material is to add back a volume of pure water or sterile water for injection (WFI) (typically equivalent to the volume removed during lyophilization), although dilute solutions of antibacterial agents are sometimes used in the production of pharmaceuticals for parenteral administration [Chen, Drug Development and Industrial Pharmacy, 18:1311-1354 (1992)]. Accordingly, methods are provided for preparation of reconstituted therapeutic peptibodies comprising the step of adding a diluent to a lyophilized therapeutic peptibody composition of the invention.

[0174] The lyophilized therapeutic peptibody composition may be reconstituted as an aqueous solution. A variety of aqueous carriers, e.g., sterile water for injection, water with preservatives for multi dose use, or water with appropriate amounts of surfactants (for example, polysorbate-20), 0.4% saline, 0.3% glycine, or aqueous suspensions may contain the active compound in admixture with excipients suitable for the manufacture of aqueous suspensions. In various aspects, such excipients are suspending agents, for example sodium carboxymethylcellulose, methylcellulose, hydroxypropylmethylcellulose, sodium alginate, polyvinylpyrrolidone, gum tragacanth and gum acacia; dispersing or wetting agents may be a naturally-occurring phosphatide, for example lecithin, or condensation products of an alkylene oxide with fatty acids, for example polyoxyethylene stearate, or condensation products of ethylene oxide with long chain aliphatic alcohols, for example heptadecaethyl-eneoxycetanol, or condensation products of ethylene oxide with partial esters derived from fatty acids and a hexitol such as polyoxyethylene sorbitol monooleate, or condensation products of ethylene oxide with partial esters derived from fatty acids and hexitol anhydrides, for example polyethylene sorbitan monooleate. The aqueous suspensions may also contain one or more preservatives, for example ethyl, or n-propyl, p-hydroxybenzoate.

[0175] To administer compositions to human or test animals, in one aspect, the compositions comprises one or more pharmaceutically acceptable carriers. The phrases “pharmaceutically” or “pharmacologically acceptable” refer to molecular entities and compositions that are stable, inhibit protein degradation such as aggregation and cleavage products, and in addition do not produce allergic, or other adverse reactions when administered using routes well-known in the art, as described below. “Pharmaceutically acceptable carriers” include any and all clinically useful solvents, dispersion media, coatings, antibacterial and antifungal agents, isotonic and absorption delaying agents and the like, including those agents disclosed above.

[0176] The therapeutic peptibody compositions may be administered orally, topically, transdermally, parenterally, by inhalation spray, vaginally, rectally, or by intracranial injection. The term parenteral as used herein includes subcutaneous injections, intravenous, intramuscular, intracistemal injection, or infusion techniques. Administration by intravenous, intradermal, intramusclar, intramammary, intraperitoneal, intrathecal, retrobulbar, intrapulmonary injection and or surgical implantation at a particular site is contemplated as well. Generally, compositions are essentially free of pyrogens, as well as other impurities that could be harmful to the recipient.

[0177] Single or multiple administrations of the compositions can be carried out with the dose levels and pattern being selected by the treating physician. For the prevention or treatment of disease, the appropriate dosage will depend on the type of disease to be treated, as defined above, the severity and course of the disease, whether drug is administered for preventive or therapeutic purposes, previous therapy, the patient's clinical history and response to the drug, and the discretion of the attending physician.

[0178] Kits

[0179] As an additional aspect, the invention includes kits which comprise one or more lyophilized compounds or compositions packaged in a manner which facilitates their use for administration to subjects. In one embodiment, such a kit includes a compound or composition described herein (e.g., a composition comprising a therapeutic protein or peptide), packaged in a container such as a sealed bottle or vessel, with a label affixed to the container or included in the package that describes use of the compound or composition in practicing the method. In one embodiment, the kit contains a first container having a lyophilized therapeutic protein or peptide composition and a second container having a physiologically acceptable reconstitution solution for the lyophilized composition. In one aspect, the compound or composition is packaged in a unit dosage form. The kit may further include a device suitable for administering the composition according to a specific route of administration. Preferably, the kit contains a label that describes use of the therapeutic protein or peptide composition.

[0180] Dosages

[0181] The dosage regimen involved in a method for treating a condition described herein will be determined by the attending physician, considering various factors which modify the action of drugs, e.g. the age, condition, body weight, sex and diet of the patient, the severity of any infection, time of administration and other clinical factors. In various aspects, the daily regimen is in the range of 0.1-1000 μg of a preparation per kilogram of body weight (calculating the mass of the protein alone, without chemical modification) or 0.1-150 μg/kg. In some embodiments of the invention, the dose may exceed 1 mg/kg, 3 mg/kg, or 10 mg/kg.

[0182] Preparations of the invention may be administered by an initial bolus followed by a continuous infusion to maintain therapeutic circulating levels of drug product. As another example, the inventive compound may be administered as a one-time dose. Those of ordinary skill in the art will readily optimize effective dosages and administration regimens as determined by good medical practice and the clinical condition of the individual patient. The frequency of dosing will depend on the pharmacokinetic parameters of the agents and the route of administration. The optimal pharmaceutical formulation will be determined by one skilled in the art depending upon the route of administration and desired dosage. See for example, Remington's Pharmaceutical Sciences, 18th Ed. (1990, Mack Publishing Co., Easton, Pa. 18042) pages 1435-1712, the disclosure of which is hereby incorporated by reference. Such formulations may influence the physical state, stability, rate of in vivo release, and rate of in vivo clearance of the administered agents. Depending on the route of administration, a suitable dose may be calculated according to body weight, body surface area or organ size. Further refinement of the calculations necessary to determine the appropriate dosage for treatment involving each of the above mentioned formulations is routinely made by those of ordinary skill in the art without undue experimentation, especially in light of the dosage information and assays disclosed herein, as well as the pharmacokinetic data observed in the human clinical trials discussed above. Appropriate dosages may be ascertained through use of established assays for determining blood level dosages in conjunction with appropriate dose-response data. The final dosage regimen will be determined by the attending physician, considering various factors which modify the action of drugs, e.g. the drug's specific activity, the severity of the damage and the responsiveness of the patient, the age, condition, body weight, sex and diet of the patient, the severity of any infection, time of administration and other clinical factors. As studies are conducted, further information will emerge regarding the appropriate dosage levels and duration of treatment for various diseases and conditions.

[0183] Structure of Compounds

[0184] In General. In preparations in accordance with the invention, a peptide is attached to a vehicle through the N-terminus of the peptide, C-terminus of the peptide, or both, and the resulting structure may be further modified with a covalently attached WSP which is attached to the vehicle moiety in the vehicle-peptide product. Thus, the therapeutic peptibody molecules of this invention may be described by the following formula I:

[(X¹)ₐ—F¹—(X²)_{b}]-(L¹)_{c}-WSP_{d} I

wherein:

[0185] F¹ is a vehicle;
[0186] X¹ is selected from
[0187] P¹-(L²)ₑ—
[0188] P²-(L³)_{f}-P¹-(L²)ₑ—
[0189] P³-(L⁴)_{g}-P²-(L³)_{f}-P¹-(L²)ₑ- and
[0190] P⁴-(L¹)ₕ-P³-(L⁴)_{g}-P²-(L³)-P¹-(L²)ₑ-

[0191] X² is selected from:
[0192] -(L²)ₑ-P¹,
[0193] -(L²)ₑ-P¹-(L³)_{f}-P²,
[0194] -(L²)ₑ-P¹-(L³)_{f}-P²-(L⁴)_{g}-P³, and
[0195] -(L²)ₑ-P¹-(L³)_{f}-P²-(L⁴)_{g}-P³-(L⁵)ₕ-P⁴

[0196] wherein P¹, P², P³, and P⁴ are each independent sequences of pharmacologically active peptides;

[0197] L¹, L², L³, L⁴, and L⁵ are each independently linkers;

[0198] a, b, c, e, f, g, and h are each independently 0 or 1,

[0199] provided that at least one of a and b is 1;

[0200] d is 0, 1, or greater than 1; and

[0201] WSP is a water soluble polymer, the attachment of which is effected at any reactive moiety in F¹.

[0202] Thus, compound I comprises compounds of the formulae

[X¹—F¹]-(L¹)_{c}-WSP_{d} II

including multimers thereof, wherein F¹ is an Fc domain and is attached at the C-terminus of X¹, and one or more WSP is attached to the Fc domain, optionally through linker L¹;

[F¹—X²]-(L¹)_{c}-WSP_{d} III

including multimers thereof, wherein F¹ is an Fc domain and is attached at the N-terminus of X², and one or more WSP is attached to the Fc domain, optionally through linker L¹;

[F¹-(L¹)ₑ-P¹]-(L¹)_{c}-WSP_{d} IV

including multimers thereof, wherein F¹ is an Fc domain and is attached at the N-terminus of -(L¹)_{c}-P¹ and one or more WSP is attached to the Fc domain, optionally through linker L¹; and

[F¹-(L¹)ₑ-P¹-(L²)_{f}-P²]-(L¹)_{c}-WSP_{d} V

including multimers thereof, wherein F¹ is an Fc domain and is attached at the N-terminus of -L¹-P¹-L²-P² and one or more WSP is attached to the Fc domain, optionally through linker L¹.

[0203] In one embodiment, F¹ is an Fc domain and is attached to either the N-terminus or C-terminus of a peptide. In a related embodiment, the Fc is linked into a dimeric form as described herein to which 2 (or more) peptides are attached. The peptides may be homodimeric (i.e., the same amino acid sequence), or heterodynammic (i.e., different amino acid sequences that bind the same target or that bind different targets).

[0204] In another embodiment, Fc-Loops comprising a peptide(s) are provided. Fc-Loops comprising a peptide(s) are prepared in a process in which at least one biologically active peptide is incorporated as an internal sequence into an Fc domain. Such an internal sequence may be added by insertion (i.e., between amino acids in the previously existing Fc domain) or by replacement of amino acids in the previously existing Fc domain (i.e., removing amino acids in the previously existing Fc domain and adding peptide amino acids). In the latter case, the number of peptide amino acids added need not correspond to the number of amino acids removed from the previously existing Fc domain. For example, in one aspect, a molecule in which 10 amino acids are removed and 15 amino acids are added is provided. Pharmacologically active compounds provided are prepared by a process comprising: a) selecting at least one peptide that modulates the activity of a protein of interest; and b) preparing a pharmacologic agent comprising an amino acid sequence of the selected peptide as an internal sequence of an Fc domain. This process may be employed to modify an Fc domain that is already linked through an N- or C-terminus or sidechain to a peptide, e.g., as described in U.S. Pat. App. Nos. 2003/0195156, 2003/0176352, 2003/0229023, and 2003/0236193, and international publication numbers WO 00/24770 and WO 04/026329. The process described in U.S. Patent Application Publication No. US2006/0140934 may also be employed to modify an Fc domain that is part of an antibody. In this way, different molecules can be produced that have additional functionalities, such as a binding domain to a different epitope or an additional binding domain to the precursor molecule's existing epitope. Molecules comprising an internal peptide sequence are also referred to as “Fc internal peptibodies” or “Fc internal peptide molecules.”

[0205] The Fc internal peptide molecules may include more than one peptide sequence in tandem in a particular internal region, and they may include further peptides in other internal regions. While the putative loop regions are preferred, insertions in any other non-terminal domains of the Fc are also considered part of this invention. Variants and derivatives of the above compounds (described below) are also encompassed by this invention.

[0206] The compounds of this invention may be prepared by standard synthetic methods, recombinant DNA techniques, or any other methods of preparing peptides and fusion proteins.

[0207] A use contemplated for Fc internal peptide molecules is as a therapeutic or a prophylactic agent. A selected peptide may have activity comparable to—or even greater than—the natural ligand mimicked by the peptide. In addition, certain natural ligand-based therapeutic agents might induce antibodies against the patient's own endogenous ligand. In contrast, the unique sequence of the vehicle-linked peptide avoids this pitfall by having little or typically no sequence identity with the natural ligand. Furthermore, the Fc internal peptibodies may have advantages in refolding and purification over N- or C-terminally linked Fc molecules. Further still, Fc internal peptibodies may be more stable in both thermodynamically, due to the stabilization of chimeric domains, and chemically, due to increased resistance to proteolytic degradation from amino- and carboxy-peptidases. Fc internal peptibodies may also exhibit improved pharmacokinetic properties.

[0208] Peptides. Any number of peptides may be used in conjunction with the present invention. Of particular interest are peptides that mimic the activity of EPO, TPO, growth hormone, G-CSF, GM-CSF, IL-1ra, CTLA4, TRAIL, TNF, VEGF, MMP, myostatin, integrin, OPG, OPG-L, NGF, TALL-1, Ang-2 binding partner(s), TGF-α, and TGF-β. Peptide antagonists are also of interest, particularly those antagonistic to the activity of TNF, any of the interleukins (IL-1, 2, 3, . . . ), and proteins involved in complement activation (e.g., C3b). Targeting peptides are also of interest, including tumor-homing peptides, membrane-transporting peptides, and the like. All of these classes of peptides may be discovered by methods described in the references cited in this specification and other references.

[0209] Phage display, in particular, is useful in generating peptides for use in the present invention. It has been stated that affinity selection from libraries of random peptides can be used to identify peptide ligands for any site of any gene product. Dedman et al. (1993), J. Biol. Chem. 268: 23025-30. Phage display is particularly well suited for identifying peptides that bind to such proteins of interest as cell surface receptors or any proteins having linear epitopes. Wilson et al. (1998), Can. J. Microbiol. 44: 313-29; Kay et al. (1998), Drug Disc. Today 3: 370-8. Such proteins are extensively reviewed in Herz et al. (1997), J. Receptor & Signal Transduction Res. 17(5): 671-776, which is hereby incorporated by reference. Such proteins of interest are preferred for use in this invention.

[0210] By way of example and without limitation, a group of peptides that bind to cytokine receptors are provided. Cytokines have recently been classified according to their receptor code. See Inglot (1997), Archivum Immunologiae et Therapiae Experimentalis 45: 353-7, which is hereby incorporated by reference. Among these receptors are the CKRs (family I in Table 3). The receptor classification appears in Table 3.

TABLE 3
Cytokine Receptors Classified by Receptor Code

| Cytokines (ligands) | | Receptor Type | |
|---|---|---|---|
| family | subfamily | family | subfamily |
| I. Hematopoietic | 1. IL-2, IL-4, IL-7, | I. Cytokine R | 1. shared γCr, IL- |
| cytokines | IL-9, IL-13, IL-15 | (CKR) | 9R, IL-4R |
| | 2. IL-3, IL-5, GM- | | 2. shared GP 140 |
| | CSF | | βR |
| | 3. IL-6, IL-11, IL- | | 3. 3. shared RP 130, |
| | 12, LIF, OSM, | | IL-6 R, Leptin R |
| | CNTF, Leptin (OB) | | 4. “single chain” R, |
| | 4. G-CSF, EPO, | | GCSF-R, TPO-R, |
| | TPO, PRL, GH | | GH-R |
| | 5. IL-17, HVS-IL- | | 5. other R² |
| | 17 | | |
| II. IL-10 ligands | IL-10, BCRF-1, | II. IL-10 R | |
| | HSV-IL-10 | | |
| III. Interferons | 1. IFN-α1, α2, α4, | III. Interferon R | 1. IFNAR |
| | m, t, IFN-β³ | | 2. IFNGR |
| | 2. IFN-γ | | |
| IV. IL-1 and IL-1 | 1. IL-1α, IL-1β, IL- | IV. IL-1R | 1. IL-1R, IL- |
| like ligands | 1Ra | | 1RAcP |
| | 2. IL-18, IL-18BP | | 2. IL-18R, IL- |
| | | | 18RAcP |
| V. TNF family | 1. TNF-α, TNF-β | 3. NGF/TNF R⁴ | TNF-RI, AGP-3R, |
| | (LT), FASL, CD40 | | DR4, DR5, OX40, |
| | L, CD30L, CD27 L, | | OPG, TACI, CD40, |
| | OX40L, OPGL, | | FAS, ODR |
| | TRAIL, APRIL, | | |
| | AGP-3, BLys, TL5, | | |
| | Ntn-2, KAY, | | |
| | Neutrokine-α | | |
| VI. Chemokines | 1. α chemokines: | 4. Chemokine R | 1. CXCR |
| | IL-8, GRO α, β, γ, | | 2. CCR |
| | IF-10, PF-4, SDF-1 | | 3. CR |
| | 2. β chemokines: | | 4. DARC⁵ |
| | MIP1α, MIP1β, | | |
| | MCP-1,2,3,4, | | |
| | RANTES, eotaxin | | |
| | 3. γ chemokines: | | |
| | lymphotactin | | |
| VII. Growth factors | 1.1 SCF, M-CSF, | VII. RKF | 1. TK sub-family |
| | PDGF-AA, AB, BB, | | 1.1 IgTK III R, |
| | KDR, FLT-1, FLT- | | VEGF-RI, VEGF-RII |
| | 3L, VEGF, SSV- | | 1.2 IgTK IV R |
| | PDGF, HGF, SF | | 1.3 Cysteine-rich |
| | 1.2 FGFα, FGFβ | | TK-I |
| | 1.3 EGF, TGF-α, | | 1.4 Cysteine rich |
| | VV-F19 (EGF-like) | | TK-II, IGF-RI |
| | 1.4 IGF-I, IGF-II, | | 1.5 Cysteine knot |
| | Insulin | | TK V |
| | 1.5 NGF, BDNF, | | 2. Serine-threonine |
| | NT-3, NT-4⁶ | | kinase subfamily |
| | 2. TGF-β1,β2,β3 | | (STKS)⁷ |

¹IL-17R - belongs to CKR family but is unassigned to 4 indicated subjamilies.
²Other IFN type I subtypes remain unassigned. Hematopoietic cytokines, IL-10 ligands and interferons do not possess functional intrinsic protein kinases. The signaling molecules for the cytokines are JAK's, STATs and related non-receptor molecules. IL-14, IL-16 and IL-18 have been cloned but according to the receptor code they remain unassigned.
³TNF receptors use multiple, distinct intracellular molecules for signal transduction including “death domain” of FAS R and 55 kDa TNF-□R that participates in their cytotoxic effects. NGF/TNF R can bind both NGF and related factors as well as TNF ligands. Chemokine receptors are seven transmembrane (7TM, serpentine) domain receptors. They are G protein-coupled.
⁴The Duffy blood group antigen (DARC) is an erythrocyte receptor that can bind several different chemokines. IL-1R belongs to the immunoglobulin superfamily but their signal transduction events characteristics remain unclear.
⁵The neurotrophic cytokines can associate with NGF/TNF receptors also.
⁶STKS may encompass many other TGF-β-related factors that remain unassigned. The protein kinases are intrinsic part of the intracellular domain of receptor kinase family (RKF). The enzymes participate in the signals transmission via the receptors.

[0211] Other proteins of interest as targets for peptide generation in the present invention include the following:

[0212] αvβ3

[0213] αVβ1

[0214] Ang-2

[0215] B7

[0216] B7RP1

[0217] CRP1

[0218] Calcitonin

[0219] CD28

[0220] CETP

[0221] cMet

[0222] Complement factor B

### C4b

### CTLA4

### Glucagon

### Glucagon Receptor

### LIPG

### MPL

[0223] splice variants of molecules preferentially expressed on tumor cells; e.g., CD44, CD30 unglycosylated variants of mucin and Lewis Y surface glycoproteins CD19, CD20, CD33, CD45
prostate specific membrane antigen and prostate specific cell antigen matrix metalloproteinases (MMPs), both secreted and membrane-bound (e.g., MMP-9)

### Cathepsins

[0224] TIE-2 receptor
heparanase
urokinase plasminogen activator (UPA), UPA receptor
parathyroid hormone (PTH), parathyroid hormone-related protein (PTHrP), PTH-RI, PTH-RII

### Her2

### Her3

### Insulin

### Myostatin

### TALL-1

[0225] Nerve growth factor
Integrins and receptors
Selectins and receptors thereof.
Cell adhesion molecules and receptors thereof.

[0226] Exemplary peptides appear in Tables 4 through 38 below. These peptides may be prepared by any methods disclosed in the art, many of which are discussed herein. In most tables that follow, single letter amino acid abbreviations are used. The “X” in these sequences (and throughout this specification, unless specified otherwise in a particular instance) means that any of the 20 naturally occurring amino acid residues may be present. Any of these peptides may be linked in tandem (i.e., sequentially), with or without linkers, and a few tandem-linked examples are provided in the table. Linkers are listed as “A” and may be any of the linkers described herein. Tandem repeats and linkers are shown separated by dashes for clarity. Any peptide containing a cysteinyl residue may be cross-linked with another Cys-containing peptide, either or both of which may be linked to a vehicle. A few cross-linked examples are provided in the table. Any peptide having more than one Cys residue may form an intrapeptide disulfide bond, as well; see, for example, EPO-mimetic peptides in Table 5. A few examples of intrapeptide disulfide-bonded peptides are specified in the table. Any of these peptides may be derivatized as described herein, and a few derivatized examples are provided in the table. Derivatized peptides in the tables are exemplary rather than limiting, as the associated underivatized peptides may be employed in this invention, as well. For derivatives in which the carboxyl terminus may be capped with an amino group, the capping amino group is shown as —NH₂. For derivatives in which amino acid residues are substituted by moieties other than amino acid residues, the substitutions are denoted by σ, which signifies any of the moieties described in Bhatnagar et al. (1996), J. Med. Chem. 39: 3814-9 and Cuthbertson et al. (1997), J. Med. Chem. 40: 2876-82, which are incorporated by reference. The J substituent and the Z substituents (Z₅, Z₆, . . . Z₄₀) are as defined in U.S. Pat. Nos. 5,608,035, 5,786,331, and 5,880,096, which are incorporated by reference. For the EPO-mimetic sequences (Table 5), the substituents X₂ through X₁₁ and the integer “n” are as defined in WO 96/40772, which is incorporated by reference. Also for the EPO-mimetic sequences, the substituents Xₙₐ, X₁ₐ, X₂ₐ, X₃ₐ, X₄ₐ, X₅ₐ and X_{ca} follow the definitions of Xₙ, X₁, X₂, X₃, X₄, X₅, and X_{c}, respectively, of WO 99/47151, which is also incorporated by reference. The substituents “Ψ” “Θ” and “+” are as defined in Sparks et al. (1996), Proc. Natl. Acad. Sci. 93: 1540-4, which is hereby incorporated by reference. X₄, X₅, X₆, and X₇ are as defined in U.S. Pat. No. 5,773,569, which is hereby incorporated by reference, except that: for integrin-binding peptides, X₁, X₂, X₃, X₄, X₅, X₆, X₇, and X₈ are as defined in International applications WO 95/14714, published Jun. 1, 1995 and WO 97/08203, published Mar. 6, 1997, which are also incorporated by reference; and for VIP-mimetic peptides, X₁, X₁′, X₁″, X₂, X₃, X₄, X₅, X₆ and Z and the integers m and n are as defined in WO 97/40070, published Oct. 30, 1997, which is also incorporated by reference. Xaa and Yaa below are as defined in WO 98/09985, published Mar. 12, 1998, which is incorporated by reference. AA₁, AA₂, AB₁, AB₂, and AC are as defined in International application WO 98/53842, published Dec. 3, 1998, which is incorporated by reference. X¹, X², X³, and X⁴ in Table 17 only are as defined in European application EP 0 911 393, published Apr. 28, 1999. Residues appearing in boldface are D-amino acids. All peptides are linked through peptide bonds unless otherwise noted. Abbreviations are listed at the end of this specification. In the “SEQ ID NO.” column, “NR” means that no sequence listing is required for the given sequence.

TABLE 4
IL-1 antagonist peptide sequences

| | |
|---|---|
| | SEQ |
| | ID |
| Sequence/structure | NO: |

| | |
|---|---|
| Z₁₁Z₇Z₈QZ₅YZ₆Z₉Z₁₀ | 3 |
| XXQZ₅YZ₆XX | 4 |
| Z₇XQZ₅YZ₆XX | 5 |
| Z₇Z₈QZ₅YZ₆Z₉Z₁₀ | 6 |
| Z₁₁Z₇Z₈QZ₅YZ₆Z₉Z₁₀ | 7 |
| Z₁₂Z₁₃Z₁₄Z₁₅Z₁₆Z₁₇Z₁₈Z₁₉Z₂₀Z₂₁Z₂₂Z₁₁Z₇Z₈QZ₅YZ₆ | 8 |
| Z₉Z₁₀L | |
| Z₂₃NZ₂₄Z₃₉Z₂₅Z₂₆Z₂₇Z₂₈Z₂₉Z₃₀Z₄₀ | 9 |
| TANVSSFEWTPYYWQPYALPL | 10 |
| SWTDYGYWQPYALPISGL | 11 |
| ETPFTWEESNAYYWQPYALPL | 12 |
| ENTYSPNWADSMYWQPYALPL | 13 |
| SVGEDHNFWTSEYWQPYALPL | 14 |
| DGYDRWRQSGERYWQPYALPL | 15 |
| FEWTPGYWQPY | 16 |
| FEWTPGYWQHY | 17 |
| FEWTPGWYQJY | 18 |
| AcFEWTPGWYQJY | 19 |
| FEWTPGWpYQJY | 20 |
| FAWTPGYWQJY | 21 |
| FEWAPGYWQJY | 22 |
| FEWVPGYWQJY | 23 |
| FEWTPGYWQJY | 24 |
| AcFEWTPGYWQJY | 25 |
| FEWTPaWYQJY | 26 |
| FEWTPSarWYQJY | 27 |
| FEWTPGYYQPY | 28 |
| FEWTPGWWQPY | 29 |
| FEWTPNYWQPY | 30 |
| FEWTPvYWQJY | 31 |
| FEWTPecGYWQJY | 32 |
| FEWTPAibYWQJY | 33 |
| FEWTSarGYWQJY | 34 |
| FEWTPGYWQPY | 35 |
| FEWTPGYWQHY | 36 |
| FEWTPGWYQJY | 37 |
| AcFEWTPGWYQJY | 38 |
| FEWTPGW-pY-QJY | 39 |
| FAWTPGYWQJY | 40 |
| FEWAPGYWQJY | 41 |
| FEWVPGYWQJY | 42 |
| FEWTPGYWQJY | 43 |
| AcFEWTPGYWQJY | 44 |
| FEWTPAWYQJY | 45 |
| FEWTPSarWYQJY | 46 |
| FEWTPGYYQPY | 47 |
| FEWTPGWWQPY | 48 |
| FEWTPNYWQPY | 49 |
| FEWTPVYWQJY | 50 |
| FEWTPecGYWQJY | 51 |
| FEWTPAibYWQJY | 52 |
| FEWTSarGYWQJY | 53 |
| FEWTPGYWQPYALPL | 54 |
| 1NapEWTPGYYQJY | 55 |
| YEWTPGYYQJY | 56 |
| FEWVPGYYQJY | 57 |
| FEWTPSYYQJY | 58 |
| FEWTPNYYQJY | 59 |
| TKPR | 60 |
| RKSSK | 61 |
| RKQDK | 62 |
| NRKQDK | 63 |
| RKQDKR | 64 |
| ENRKQDKRF | 65 |
| VTKFYF | 66 |
| VTKFY | 67 |
| VTDFY | 68 |
| SHLYWQPYSVQ | 69 |
| TLVYWQPYSLQT | 70 |
| RGDYWQPYSVQS | 71 |
| VHVYWQPYSVQT | 72 |
| RLVYWQPYSVQT | 73 |
| SRVWFQPYSLQS | 74 |
| NMVYWQPYSIQT | 75 |
| SVVFWQPYSVQT | 76 |
| TFVYWQPYALPL | 77 |
| TLVYWQPYSIQR | 78 |
| RLVYWQPYSVQR | 79 |
| SPVFWQPYSIQI | 80 |
| WIEWWQPYSVQS | 81 |
| SLIYWQPYSLQM | 82 |
| TRLYWQPYSVQR | 83 |
| RCDYWQPYSVQT | 84 |
| MRVFWQPYSVQN | 85 |
| KIVYWQPYSVQT | 86 |
| RHLYWQPYSVQR | 87 |
| ALVWWQPYSEQI | 88 |
| SRVWFQPYSLQS | 89 |
| WEQPYALPLE | 90 |
| QLVWWQPYSVQR | 91 |
| DLRYWQPYSVQV | 92 |
| ELVWWQPYSLQL | 93 |
| DLVWWQPYSVQW | 94 |
| NGNYWQPYSFQV | 95 |
| ELVYWQPYSIQR | 96 |
| ELMYWQPYSVQE | 97 |
| NLLYWQPYSMQD | 98 |
| GYEWYQPYSVQR | 99 |
| SRVWYQPYSVQR | 100 |
| LSEQYQPYSVQR | 101 |
| GGGWWQPYSVQR | 102 |
| VGRWYQPYSVQR | 103 |
| VHVYWQPYSVQR | 104 |
| QARWYQPYSVQR | 105 |
| VHVYWQPYSVQT | 106 |
| RSVYWQPYSVQR | 107 |
| TRVWFQPYSVQR | 108 |
| GRIWFQPYSVQR | 109 |
| GRVWFQPYSVQR | 110 |
| ARTWYQPYSVQR | 111 |
| ARVWWQPYSVQM | 112 |
| RLMFYQPYSVQR | 113 |
| ESMWYQPYSVQR | 114 |
| HFGWWQPYSVHM | 115 |
| ARFWWQPYSVQR | 116 |
| RLVYWQ PYAPIY | 117 |
| RLVYWQ PYSYQT | 118 |
| RLVYWQ PYSLPI | 119 |
| RLVYWQ PYSVQA | 120 |
| SRVWYQ PYAKGL | 121 |
| SRVWYQ PYAQGL | 122 |
| SRVWYQ PYAMPL | 123 |
| SRVWYQ PYSVQA | 124 |
| SRVWYQ PYSLGL | 125 |
| SRVWYQ PYAREL | 126 |
| SRVWYQ PYSRQP | 127 |
| SRVWYQ PYFVQP | 128 |
| EYEWYQ PYALPL | 129 |
| IPEYWQ PYALPL | 130 |
| SRIWWQ PYALPL | 131 |
| DPLFWQ PYALPL | 132 |
| SRQWVQ PYALPL | 133 |
| IRSWWQ PYALPL | 134 |
| RGYWQ PYALPL | 135 |
| RLLWVQ PYALPL | 136 |
| EYRWFQ PYALPL | 137 |
| DAYWVQ PYALPL | 138 |
| WSGYFQ PYALPL | 139 |
| NIEFWQ PYALPL | 140 |
| TRDWVQ PYALPL | 141 |
| DSSWYQ PYALPL | 142 |
| IGNWYQ PYALPL | 143 |
| NLRWDQ PYALPL | 144 |
| LPEFWQ PYALPL | 145 |
| DSYWWQ PYALPL | 146 |
| RSQYYQ PYALPL | 147 |
| ARFWLQ PYALPL | 148 |
| NSYFWQ PYALPL | 149 |
| RFMYWQPYSVQR | 150 |
| AHLFWQPYSVQR | 151 |
| WWQPYALPL | 152 |
| YYQPYALPL | 153 |
| YFQPYALGL | 154 |
| YWYQPYALPL | 155 |
| RWWQPYATPL | 156 |
| GWYQPYALGF | 157 |
| YWYQPYALGL | 158 |
| IWYQPYAMPL | 159 |
| SNMQPYQRLS | 160 |
| TFVYWQPY AVGLPAAETACN | 161 |
| TFVYWQPY SVQMTITGKVTM | 162 |
| TFVYWQPY SSHXXVPXGFPL | 163 |
| TFVYWQPY YGNPQWAIHVRH | 164 |
| TFVYWQPY VLLELPEGAVRA | 165 |
| TFVYWQPY VDYVWPIPIAQV | 166 |
| GWYQPYVDGWR | 167 |
| RWEQPYVKDGWS | 168 |
| EWYQPYALGWAR | 169 |
| GWWQPYARGL | 170 |
| LFEQPYAKALGL | 171 |
| GWEQPYARGLAG | 172 |
| AWVQPYATPLDE | 173 |
| MWYQPYSSQPAE | 174 |
| GWTQPYSQQGEV | 175 |
| DWFQPYSIQSDE | 176 |
| PWIQPYARGFG | 177 |
| RPLYWQPYSVQV | 178 |
| TLIYWQPYSVQI | 179 |
| RFDYWQPYSDQT | 180 |
| WHQFVQPYALPL | 181 |
| EWDS VYWQPYSVQ TLLR | 182 |
| WEQN VYWQPYSVQ SFAD | 183 |
| SDV VYWQPYSVQ SLEM | 184 |
| YYDG VYWQPYSVQ VMPA | 185 |
| SDIWYQ PYALPL | 186 |
| QRIWWQ PYALPL | 187 |
| SRIWWQ PYALPL | 188 |
| RSLYWQ PYALPL | 189 |
| TIIWEQ PYALPL | 190 |
| WETWYQ PYALPL | 191 |
| SYDWEQ PYALPL | 192 |
| SRIWCQ PYALPL | 193 |
| EIMFWQ PYALPL | 194 |
| DYVWQQ PYALPL | 195 |
| MDLLVQ WYQPYALPL | 196 |
| GSKVIL WYQPYALPL | 197 |
| RQGANI WYQPYALPL | 198 |
| GGGDEP WYQPYALPL | 199 |
| SQLERT WYQPYALPL | 200 |
| ETWVRE WYQPYALPL | 201 |
| KKGSTQ WYQPYALPL | 202 |
| LQARMN WYQPYALPL | 203 |
| EPRSQK WYQPYALPL | 204 |
| VKQKWR WYQPYALPL | 205 |
| LRRHDV WYQPYALPL | 206 |
| RSTASI WYQPYALPL | 207 |
| ESKEDQ WYQPYALPL | 208 |
| EGLTMK WYQPYALPL | 209 |
| EGSREG WYQPYALPL | 210 |
| VIEWWQ PYALPL | 211 |
| VWYWEQ PYALPL | 212 |
| ASEWWQ PYALPL | 213 |
| FYEWWQ PYALPL | 214 |
| EGWWVQ PYALPL | 215 |
| WGEWLQ PYALPL | 216 |
| DYVWEQ PYALPL | 217 |
| AHTWWQ PYALPL | 218 |
| FIEWFQ PYALPL | 219 |
| WLAWEQ PYALPL | 220 |
| VMEWWQ PYALPL | 221 |
| ERMWQ PYALPL | 222 |
| NXXWXX PYALPL | 223 |
| WGNWYQ PYALPL | 224 |
| TLYWEQ PYALPL | 225 |
| VWRWEQ PYALPL | 226 |
| LLWTQ PYALPL | 227 |
| SRIWXX PYALPL | 228 |
| SDIWYQ PYALPL | 229 |
| WGYYXX PYALPL | 230 |
| TSGWYQ PYALPL | 231 |
| VHPYXX PYALPL | 232 |
| EHSYFQ PYALPL | 233 |
| XXIWYQ PYALPL | 234 |
| AQLHSQ PYALPL | 235 |
| WANWFQ PYALPL | 236 |
| SRLYSQ PYALPL | 237 |
| GVTFSQ PYALPL | 238 |
| SIVWSQ PYALPL | 239 |
| SRDLVQ PYALPL | 240 |
| HWGH VYWQPYSVQ DDLG | 241 |
| SWHS VYWQPYSVQ SVPE | 242 |
| WRDS VYWQPYSVQ PESA | 243 |
| TWDA VYWQPYSVQ KWLD | 244 |
| TPPW VYWQPYSVQ SLDP | 245 |
| YWSS VYWQPYSVQ SVHS | 246 |
| YWY QPY ALGL | 247 |
| YWY QPY ALPL | 248 |
| EWI QPY ATGL | 249 |
| NWE QPY AKPL | 250 |
| AFY QPY ALPL | 251 |
| FLY QPY ALPL | 252 |
| VCK QPY LEWC | 253 |
| ETPFTWEESNAYYWQPYALPL | 254 |
| QGWLTWQDSVDMYWQPYALPL | 255 |
| FSEAGYTWPENTYWQPYALPL | 256 |
| TESPGGLDWAKIYWQPYALPL | 257 |
| DGYDRWRQSGERYWQPYALPL | 258 |
| TANVSSFEWTPGYWQPYALPL | 259 |
| SVGEDHNFWTSE YWQPYALPL | 260 |
| MNDQTSEVSTFP YWQPYALPL | 261 |
| SWSEAFEQPRNL YWQPYALPL | 262 |
| QYAEPSALNDWG YWQPYALPL | 263 |
| NGDWATADWSNY YWQPYALPL | 264 |
| THDEHI YWQPYALPL | 265 |
| MLEKTYTTWTPG YWQPYALPL | 266 |
| WSDPLTRDADL YWQPYALPL | 267 |
| SDAFTTQDSQAM YWQPYALPL | 268 |
| GDDAAWRTDSLT YWQPYALPL | 269 |
| AIIRQLYRWSEM YWQPYALPL | 270 |
| ENTYSPNWADSM YWQPYALPL | 271 |
| MNDQTSEVSTFP YWQPYALPL | 272 |
| SVGEDHNFWTSE YWQPYALPL | 273 |
| QTPFTWEESNAY YWQPYALPL | 274 |
| ENPFTWQESNAY YWQPYALPL | 275 |
| VTPFTWEDSNVF YWQPYALPL | 276 |
| QIPFTWEQSNAY YWQPYALPL | 277 |
| QAPLTWQESAAY YWQPYALPL | 278 |
| EPTFTWEESKAT YWQPYALPL | 279 |
| TTTLTWEESNAY YWQPYALPL | 280 |
| ESPLTWEESSAL YWQPYALPL | 281 |
| ETPLTWEESNAY YWQPYALPL | 282 |
| EATFTWAESNAY YWQPYALPL | 283 |
| EALFTWKESTAY YWQPYALPL | 284 |
| STP-TWEESNAY YWQPYALPL | 285 |
| ETPFTWEESNAY YWQPYALPL | 286 |
| KAPFTWEESQAY YWQPYALPL | 287 |
| STSFTWEESNAY YWQPYALPL | 288 |
| DSTFTWEESNAY YWQPYALPL | 289 |
| YIPFTWEESNAY YWQPYALPL | 290 |
| QTAFTWEESNAY YWQPYALPL | 291 |
| ETLFTWEESNAT YWQPYALPL | 292 |
| VSSFTWEESNAY YWQPYALPL | 293 |
| QPYALPL | 294 |
| Py-1-NapPYQJYALPL | 295 |
| TANVSSFEWTPG YWQPYALPL | 296 |
| FEWTPGYWQPYALPL | 297 |
| FEWTPGYWQJYALPL | 298 |
| FEWTPGYYQJYALPL | 299 |
| ETPFTWEESNAYYWQPYALPL | 300 |
| FTWEESNAYYWQJYALPL | 301 |
| ADVL YWQPYA PVTLWV | 302 |
| GDVAE YWQPYA LPLTSL | 303 |
| SWTDYG YWQPYA LPISGL | 304 |
| FEWTPGYWQPYALPL | 305 |
| FEWTPGYWQJYALPL | 306 |
| FEWTPGWYQPYALPL | 307 |
| FEWTPGWYQJYALPL | 308 |
| FEWTPGYYQPYALPL | 309 |
| FEWTPGYYQJYALPL | 310 |
| TANVSSFEWTPGYWQPYALPL | 311 |
| SWTDYGYWQPYALPISGL | 312 |
| ETPFTWEESNAYYWQPYALPL | 313 |
| ENTYSPNWADSMYWQPYALPL | 314 |
| SVGEDHNFWTSEYWQPYALPL | 315 |
| DGYDRWRQSGERYWQPYALPL | 316 |
| FEWTPGYWQPYALPL | 317 |
| FEWTPGYWQPY | 318 |
| FEWTPGYWQJY | 319 |
| EWTPGYWQPY | 320 |
| FEWTPGWYQJY | 321 |
| AEWTPGYWQJY | 322 |
| FAWTPGYWQJY | 323 |
| FEATPGYWQJY | 324 |
| FEWAPGYWQJY | 325 |
| FEWTAGYWQJY | 326 |
| FEWTPAYWQJY | 327 |
| FEWTPGAWQJY | 328 |
| FEWTPGYAQJY | 329 |
| FEWTPGYWQJA | 330 |
| FEWTGGYWQJY | 331 |
| FEWTPGYWQJY | 332 |
| FEWTJGYWQJY | 333 |
| FEWTPecGYWQJY | 334 |
| FEWTPAibYWQJY | 335 |
| FEWTPSarWYQJY | 336 |
| FEWTSarGYWQJY | 337 |
| FEWTPNYWQJY | 338 |
| FEWTPVYWQJY | 339 |
| FEWTVPYWQJY | 340 |
| AcFEWTPGWYQJY | 341 |
| AcFEWTPGYWQJY | 342 |
| lNap-EWTPGYYQJY | 343 |
| YEWTPGYYQJY | 344 |
| FEWVPGYYQJY | 345 |
| FEWTPGYYQJY | 346 |
| FEWTPsYYQJY | 347 |
| FEWTPnYYQJY | 348 |
| SHLY-Nap-QPYSVQM | 349 |
| TLVY-Nap-QPYSLQT | 350 |
| RGDY-Nap-QPYSVQS | 351 |
| NMVY-Nap-QPYSIQT | 352 |
| VYWQPYSVQ | 353 |
| VY-Nap-QPYSVQ | 354 |
| TFVYWQJYALPL | 355 |
| FEWTPGYYQJ-Bpa | 356 |
| XaaFEWTPGYYQJ-Bpa | 357 |
| FEWTPGY-Bpa-QJY | 358 |
| AcFEWTPGY-Bpa-QJY | 359 |
| FEWTPG-Bpa-YQJY | 360 |
| AcFEWTPG-Bpa-YQJY | 361 |
| AcFE-Bpa-TPGYYQJY | 362 |
| AcFE-Bpa-TPGYYQJY | 363 |
| Bpa-EWTPGYYQJY | 364 |
| AcBpa-EWTPGYYQJY | 365 |
| VYWQPYSVQ | 366 |
| RLVYWQPYSVQR | 367 |
| RLVY-Nap-QPYSVQR | 368 |
| RLDYWQPYSVQR | 369 |
| RLVWFQPYSVQR | 370 |
| RLVYWQPYSIQR | 371 |
| DNSSWYDSFLL | 372 |
| DNTAWYESFLA | 373 |
| DNTAWYENFLL | 374 |
| PARE DNTAWYDSFLI WC | 375 |
| TSEY DNTTWYEKFLA SQ | 376 |
| SQIP DNTAWYQSFLL HG | 377 |
| SPFI DNTAWYENFLL TY | 378 |
| EQIY DNTAWYDHFLL SY | 379 |
| TPFI DNTAWYENFLL TY | 380 |
| TYTY DNTAWYERFLM SY | 381 |
| TMTQ DNTAWYENFLL SY | 382 |
| TI DNTAWYANLVQ TYPQ | 383 |
| TI DNTAWYERFLA QYPD | 384 |
| HI DNTAWYENFLL TYTP | 385 |
| SQ DNTAWYENFLL SYKA | 386 |
| QI DNTAWYERFLL QYNA | 387 |
| NQ DNTAWYESFLL QYNT | 388 |
| TI DNTAWYENFLL NHNL | 389 |
| HY DNTAWYERFLQ QGWH | 390 |
| ETPFTWEESNAYYWQPYALPL | 391 |
| YIPFTWEESNAYYWQPYALPL | 392 |
| DGYDRWRQSGERYWQPYALPL | 393 |
| pY-lNap-pY-QJYALPL | 394 |
| TANVSSFEWTPGYWQPYALPL | 395 |
| FEWTPGYWQJYALPL | 396 |
| FEWTPGYWQPYALPLSD | 397 |
| FEWTPGYYQJYALPL | 398 |
| FEWTPGYWQJY | 399 |
| AcFEWTPGYWQJY | 400 |
| AcFEWTPGWYQJY | 401 |
| AcFEWTPGYYQJY | 402 |
| AcFEWTPaYWQJY | 403 |
| AcFEWTPaWYQJY | 404 |
| AcFEWTPaYYQJY | 405 |
| FEWTPGYYQJYALPL | 406 |
| FEWTPGYWQJYALPL | 407 |
| FEWTPGWYQJYALPL | 408 |
| TANVSSFEWTPGYWQPYALPL | 409 |
| AcFEWTPGYWQJY | 410 |
| AcFEWTPGWYQJY | 411 |
| AcFEWTPGYYQJY | 412 |
| AcFEWTPAYWQJY | 413 |
| AcFEWTPAWYQJY | 414 |
| AcFEWTPAYYQJY | 415 |

TABLE 5
EPO-mimetic peptide sequences

| | SEQ |
|---|---|
| Sequence/structure | ID NO: |
| YXCXXGPXTWXCXP | 416 |
| YXCXXGPXTWXCXP-YXCXXGPXTWXCXP | 417 |
| YXCXXGPXTWXCXP-Λ-YXCXXGPXTWXCXP | 418 |
| [chemical structure] | 419 |
| GGTYSCHFGPLTWVCKPQGG | 420 |
| GGDYHCRMGPLTWVCKPLGG | 421 |
| GGVYACRMGPITWVCSPLGG | 422 |
| VGNYMCHFGPITWVGRPGGG | 423 |
| GGLYLCRFGPVTWDCGYKGG | 424 |
| GGTYSCHFGPLTWVCKPQGG- | 425 |
| GGTYSCHFGPLTWVCKPQGG | |
| GGTYSCHFGPLTWVCKPQGG-Λ- | 426 |
| GGTYSCHFGPLTWVCKPQGG | |
| GGTYSCHFGPLTWVCKPQGGSSK | 427 |
| GGTYSCHFGPLTWVCKPQGGSSK- | 428 |
| GGTYSCHFGPLTWVCKPQGGSSK | |
| GGTYSCHFGPLTWVCKPQGGSSK-Λ- | 429 |
| GGTYSCHFGPLTWVCKPQGGSSK | |
| [chemical structure] | 430 |
| GGTYSCHFGPLTWVCKPQGGSSK(Λ-biotin) | 431 |
| CX₄X₅GPX₆TWX₇C | 432 |
| GGTYSCHGPLTWVCKPQGG | 433 |
| VGNYMAHMGPITWVCRPGG | 434 |
| GGPHHVYACRMGPLTWIC | 435 |
| GGTYSCHFGPLTWVCKPQ | 436 |
| GGLYACHMGPMTWVCQPLRG | 437 |
| TIAQYICYMGPETWECRPSPKA | 438 |
| YSCHFGPLTWVCK | 439 |
| YCHFGPLTWVC | 440 |
| X₃X₄X₅GPX₆TWX₇X₈ | 441 |
| YX₂X₃X₄X₅GPX₆TWX₇X₈ | 442 |
| X₁YX₂X₃X₄X₅GPX₆TWX₇X₈X₉X₁₀X₁₁ | 443 |
| X₁YX₂CX₄X₅GPX₆TWX₇CX₉X₁₀X₁₁ | 444 |
| GGLYLCRFGPVTWDCGYKGG | 445 |
| GGTYSCHFGPLTWVCKLPQGG | 446 |
| GGDYHCRMGPLTWVCKPLGG | 447 |
| VGNYMCHFGPITWVCRPGGG | 448 |
| GGVYACRMGPITWVCSPLGG | 449 |
| VGNYMAHMGPITWVCRPGG | 450 |
| GGTYSCHFGPLTWVCKPQ | 451 |
| GGLYACHMGPMTWVCQPLRG | 452 |
| TIAQYICYMGPETWECRPSPKA | 453 |
| YSCHFGPLTWVCK | 454 |
| YCHFGPLTWVC | 455 |
| SCHFGPLTWVCK | 456 |
| (AX₂)ₙX₃X₄X₅GPX₆TWX₇X₈ | 457 |
| XₙCX₁X₂GWVGX₃CX₄X₅WX_{C} | 458 |

TABLE 6
TPO-mimetic peptide sequences

| | SEQ |
|---|---|
| Sequence/structure | ID NO: |
| IEGPTLRQWLAARA | 459 |
| IEGPTLRQWLAAKA | 460 |
| IEGPTLREWLAARA | 461 |
| IEGPTLRQWLAARA-Λ-IEGPTLRQWLAARA | 462 |
| IEGPTLRQWLAAKA-Λ-IEGPTLRQWLAAKA | 463 |
| [chemical structure] | 464 |
| IEGPTLRQWLAARA-Λ-K(BrAc)-Λ-IEGPTLRQWLAARA | 465 |
| IEGPTLRQWLAARA-Λ-K(PEG)-Λ-IEGPTLRQWLAARA | 466 |
| [chemical structure] | 467 |
| [chemical structure] | 468 |
| VRDQIXXXL | 469 |
| TLREWL | 470 |
| GRVRDQVAGW | 471 |
| GRVKDQIAQL | 472 |
| GVRDQVSWAL | 473 |
| ESVREQVMKY | 474 |
| SVRSQISASL | 475 |
| GVRETVYRIHM | 476 |
| GVREVIVMHML | 477 |
| GRVRDQIWAAL | 478 |
| AGVRDQILIWL | 479 |
| GRVRDQIMLSL | 480 |
| GRVRDQI(X)₃L | 481 |
| CTLRQWLQGC | 482 |
| CTLQEFLEGC | 483 |
| CTRTEWLHGC | 484 |
| CTLREWLHGGFC | 485 |
| CTLREWVFAGLC | 486 |
| CTLRQWLILLGMC | 487 |
| CTLAEFLASGVEQC | 488 |
| CSLQEFLSHGGYVC | 489 |
| CTLREFLDPTTAVC | 490 |
| CTLKEWLVSHEVWC | 491 |
| CTLREWL(X)₂₋₆C | 492 |
| REGPTLRQWM | 493 |
| EGPTLRQWLA | 494 |
| ERGPFWAKAC | 495 |
| REGPRCVMWM | 496 |
| CGTEGPTLSTWLDC | 497 |
| CEQDGPTLLEWLKC | 498 |
| CELVGPSLMSWLTC | 499 |
| CLTGPFVTQWLYEC | 500 |
| CRAGPTLLEWLTLC | 501 |
| CADGPTLREWISFC | 502 |
| C(X)₁₋₂EGPTLREWL(X)₁₋₂C | 503 |
| GGCTLREWLHGGFCGG | 504 |
| GGCADGPTLREWISFCGG | 505 |
| GNADGPTLRQWLEGRRPKN | 506 |
| LAIEGPTLRQWLHGNGRDT | 507 |
| HGRVGPTLREWKTQVATKK | 508 |
| TIKGPTLRQWLKSREHTS | 509 |
| ISDGPTLKEWLSVTRGAS | 510 |
| SIEGPTLREWLTSRTPHS | 511 |

TABLE 7
G-CSF-mimetic peptide sequences

| | SEQ |
|---|---|
| Sequence/structure | ID NO: |
| EEDCK | 512 |
| [chemical structure] | 513 |
| EEDσK | 514 |
| [chemical structure] | 515 |
| pGluEDσK | 516 |
| [chemical structure] | 517 |
| PicSDσK | 518 |
| [chemical structure] | 519 |
| EEDCK-Λ-EEDCK | 520 |
| EEDXK-Λ-EEDXK | 521 |

TABLE 8
TNF-antagonist peptide sequences

| | SEQ |
|---|---|
| Sequence/structure | ID NO: |
| YCFTASENHCY | 522 |
| YCFTNSENHCY | 523 |
| YCFTRSENHCY | 524 |
| FCASENHCY | 525 |
| YCASENHCY | 526 |
| FCNSENHCY | 527 |
| FCNSENRCY | 528 |
| FCNSVENRCY | 529 |
| YCSQSVSNDCF | 530 |
| FCVSNDRCY | 531 |
| YCRKELGQVCY | 532 |
| YCKEPGQCY | 533 |
| YCRKEMGCY | 534 |
| FCRKEMGCY | 535 |
| YCWSQNLCY | 536 |
| YCELSQYLCY | 537 |
| YCWSQNYCY | 538 |
| YCWSQYLCY | 539 |
| DFLPHYKNTSLGHRP | 540 |
| [chemical structure] | NR |

TABLE 9
Integrin-binding peptide sequences

| | SEQ |
|---|---|
| | ID |
| Sequence/structure | NO: |
| RX₁ETX₂WX₃ | 541 |
| RX₁ETX₂WX₃ | 542 |
| RGDGX | 543 |
| CRGDGXC | 544 |
| CX₁X₂RLDX₃X₄C | 545 |
| CARRLDAPC | 546 |
| CPSRLDSPC | 547 |
| X₁X₂X₃RGDX₄X₅X₆ | 548 |
| CX₂CRGDCX₅C | 549 |
| CDCRGDCFC | 550 |
| CDCRGDCLC | 551 |
| CLCRGDCIC | 552 |
| X₁X₂DDX₄X₅X₇X₈ | 553 |
| X₁X₂X₃DDX₄X₅X₆X₇X₈ | 554 |
| CWDDGWLC | 555 |
| CWDDLWWLC | 556 |
| CWDDGLMC | 557 |
| CWDDGWMC | 558 |
| CSWDDGWLC | 559 |
| CPDDLWWLC | 560 |
| NGR | NR |
| GSL | NR |
| RGD | NR |
| CGRECPRLCQSSC | 561 |
| CNGRCVSGCAGRC | 562 |
| CLSGSLSC | 563 |
| RGD | NR |
| NGR | NR |
| GSL | NR |
| NGRAHA | 564 |
| CNGRC | 565 |
| CDCRGDCFC | 566 |
| CGSLVRC | 567 |
| DLXXL | 568 |
| RTDLDSLRTYTL | 569 |
| RTDLDSLRTY | 570 |
| RTDLDSLRT | 571 |
| RTDLDSLR | 572 |
| GDLDLLKLRLTL | 573 |
| GDLHSLRQLLSR | 574 |
| RDDLHMLRLQLW | 575 |
| SSDLHALKKRYG | 576 |
| RGDLKQLSELTW | 577 |
| RGDLAALSAPPV | 578 |

TABLE 10
Selectin antagonist peptide sequences

| | SEQ |
|---|---|
| | ID |
| Sequence/structure | NO: |
| DITWDQLWDLMK | 579 |
| DITWDELWKIMN | 580 |
| DYTWFELWDMMQ | 581 |
| QITWAQLWNMMK | 582 |
| DMTWHDLWTLMS | 583 |
| DYSWHDLWEMMS | 584 |
| EITWDQLWEVMN | 585 |
| HVSWEQLWDIMN | 586 |
| HITWDQLWRIMT | 587 |
| RNMSWLELWEHMK | 588 |
| AEWTWDQLWHVMNPAESQ | 589 |
| HRAEWLALWEQMSP | 590 |
| KKEDWLALWRIMSV | 591 |
| ITWDQLWDLMK | 592 |
| DITWDQLWDLMK | 593 |
| DITWDQLWDLMK | 594 |
| DITWDQLWDLMK | 595 |
| CQNRYTDLVAIQNKNE | 596 |
| AENWADNEPNNKRNNED | 597 |
| RKNNKTWTWVGTKKALTNE | 598 |
| KKALTNEAENWAD | 599 |
| CQXRYTDLVAIQNKXE | 600 |
| RKXNXXWTWVGTXKXLTEE | 601 |
| AENWADGEPNNKXNXED | 602 |
| CXXXYTXLVAIQNKXE | 603 |
| RKXXXXWXWVGTXKXLTXE | 604 |
| AXNWXXXEPNNXXXED | 605 |
| XKXKTXEAXNWXX | 606 |

TABLE 11
Antipathogenic peptide sequences

| | SEQ |
|---|---|
| | ID |
| Sequence/structure | NO: |
| GFFALIPKIISSPLFKTLLSAVGSALSSSGGQQ | 607 |
| GFFALIPKIISSPLFKTLLSAVGSALSSSGGQE | 608 |
| GFFALIPKIISSPLFKTLLSAV | 609 |
| GFFALIPKIISSPLFKTLLSAV | 610 |
| KGFFALIPKIISSPLFKTLLSAV | 611 |
| KKGFFALIPKIISSPLFKTLLSAV | 612 |
| KKGFFALIPKIISSPLFKTLLSAV | 613 |
| GFFALIPKIIS | 614 |
| GIGAVLKVLTTGLPALISWIKRKRQQ | 615 |
| GIGAVLKVLTTGLPALISWIKRKRQQ | 616 |
| GIGAVLKVLTTGLPALISWIKRKRQQ | 617 |
| GIGAVLKVLTTGLPALISWIKR | 618 |
| AVLKVLTTGLPALISWIKR | 619 |
| KLLLLLKLLLLK | 620 |
| KLLLKLLLKLLK | 621 |
| KLLLKLKLKLLK | 622 |
| KKLLKLKLKLKK | 623 |
| KLLLKLLLKLLK | 624 |
| KLLLKLKLKLLK | 625 |
| KLLLLK | 626 |
| KLLLKLLK | 627 |
| KLLLKLKLKLLK | 628 |
| KLLLKLKLKLLK | 629 |
| KLLLKLKLKLLK | 630 |
| KAAAKAAAKAAK | 631 |
| KVVVKVVVKVVK | 632 |
| KVVVKVKVKVVK | 633 |
| KVVVKVKVKVK | 634 |
| KVVVKVKVKVVK | 635 |
| KLILKL | 636 |
| KVLHLL | 637 |
| LKLRLL | 638 |
| KPLHLL | 639 |
| KLILKLVR | 640 |
| KVFHLLHL | 641 |
| HKFRILKL | 642 |
| KPFHILHL | 643 |
| KIIIKIKIKIIK | 644 |
| KIIIKIKIKIIK | 645 |
| KIIIKIKIKIIK | 646 |
| KIPIKIKIKIPK | 647 |
| KIPIKIKIKIVK | 648 |
| RIIIRIRIRIIR | 649 |
| RIIIRIRIRIIR | 650 |
| RIIIRIRIRIIR | 651 |
| RIVIRIRIRLIR | 652 |
| RIIVRIRLRIIR | 653 |
| RIGIRLRVRIIR | 654 |
| KIVIRIRIRLIR | 655 |
| RIAVKWRLRFIK | 656 |
| KIGWKLRVRIIR | 657 |
| KKIGWLIIRVRR | 658 |
| RIVIRIRIRLIRIR | 659 |
| RIIVRIRLRIIRVR | 660 |
| RIGIRLRVRIIRRV | 661 |
| KIVIRIRARLIRIRIR | 662 |
| RIIVKIRLRIIKKIRL | 663 |
| KIGIKARVRIIRVKII | 664 |
| RIIVHIRLRIIHHIRL | 665 |
| HIGIKAHVRIIRVHII | 666 |
| RIYVKIHLRYIKKIRL | 667 |
| KIGHKARVHIIRYKII | 668 |
| RIYVKPHPRYIKKIRL | 669 |
| KPGHKARPHIIRYKII | 670 |
| KIVIRIRIRLIRIRIRKIV | 671 |
| RIIVKIRLRIIKKIRLIKK | 672 |
| KIGWKLRVRIIRVKIGRLR | 673 |
| KIVIRIRIRLIRIRIRKIVKVKRIR | 674 |
| RFAVKIRLRIIKKIRLIKKIRKRVIK | 675 |
| KAGWKLRVRIIRVKIGRLRKIGWKKRVRIK | 676 |
| RIYVKPHPRYIKKIRL | 677 |
| KPGHKARPHIIRYKII | 678 |
| KIVIRIRIRLIRIRIRKIV | 679 |
| RIIVKIRLRIIKKIRLIKK | 680 |
| RIYVSKISIYIKKIRL | 681 |
| KIVIFTRIRLTSIRIRSIV | 682 |
| KPIHKARPTIIRYKMI | 683 |
| cyclicCKGFFALIPKIISSPLFKTLLSAVC | 684 |
| CKKGFFALIPKIISSPLFKTLLSAVC | 685 |
| CKKKGFFALIPKIISSPLFKTLLSAVC | 686 |
| CyclicCRIVIRIRIRLIRIRC | 687 |
| CyclicCKPGHKARPHIIRYKIIC | 688 |
| CyclicCRFAVKIRLRIIKKIRLIKKIRKRVIKC | 689 |
| KLLLKLLL KLLKC | 690 |
| KLLLKLLLKLLK | 691 |
| KLLLKLKLKLLKC | 692 |
| KLLLKLLLKLLK | 693 |

TABLE 12
VIP-mimetic peptide sequences

| | SEQ |
|---|---|
| Sequence/structure | ID NO: |
| HSDAVFYDNYTR LRKQMAVKKYLN SILN | 694 |
| Nle HSDAVFYDNYTR LRKQMAVKKYLN SILN | 695 |
| X₁X₁′X₁″X₂ | 696 |
| X₃SX₄LN | 697 |
| [chemical structure] | 698 |
| KKYL | 699 |
| NSILN | 700 |
| KKYL | 701 |
| KKYA | 702 |
| AVKKYL | 703 |
| NSILN | 704 |
| KKYV | 705 |
| SILauN | 706 |
| KKYLNle | 707 |
| NSYLN | 708 |
| NSIYN | 709 |
| KKYLPPNSILN | 710 |
| LauKKYL | 711 |
| CapKKYL | 712 |
| KYL | 713 |
| KKYNle | 714 |
| VKKYL | 715 |
| LNSILN | 716 |
| YLNSILN | 717 |
| KKYLN | 718 |
| KKYLNS | 719 |
| KKYLNSI | 720 |
| KKYLNSIL | 721 |
| KKYL | 722 |
| KKYDA | 723 |
| AVKKYL | 724 |
| NSILN | 725 |
| KKYV | 726 |
| SILauN | 727 |
| NSYLN | 728 |
| NSIYN | 729 |
| KKYLNle | 730 |
| KKYLPPNSILN | 731 |
| KKYL | 732 |
| KKYDA | 733 |
| AVKKYL | 734 |
| NSILN | 735 |
| KKYV | 736 |
| SILauN | 737 |
| LauKKYL | 738 |
| CapKKYL | 739 |
| KYL | 740 |
| KYL | 741 |
| KKYNle | 742 |
| VKKYL | 743 |
| LNSILN | 744 |
| YLNSILN | 745 |
| KKYLNle | 746 |
| KKYLN | 747 |
| KKYLNS | 748 |
| KKYLNSI | 749 |
| KKYLNSIL | 750 |
| KKKYLD | 751 |
| cyc1icCKKYLC | 752 |
| [chemical structure] | 753 |
| KKYA | 754 |
| WWTDTGLW | 755 |
| WWTDDGLW | 756 |
| WWDTRGLWVWTI | 757 |
| FWGNDGIWLESG | 758 |
| DWDQFGLWRGAA | 759 |
| RWDDNGLWVVVL | 760 |
| SGMWSHYGIWMG | 761 |
| GGRWDQAGLWVA | 762 |
| KLWSEQGIWMGE | 763 |
| CWSMIIGLWLC | 764 |
| GCWDNTGIWVPC | 765 |
| DWDTRGLWVY | 766 |
| SLWDENGAWI | 767 |
| KWDDRGLWMH | 768 |
| QAWNERGLWT | 769 |
| QWDTRGLWVA | 770 |
| WNVHGIWQE | 771 |
| SWDTRGLWVE | 772 |
| DWDTRGLWVA | 773 |
| SWGRDGLWIE | 774 |
| EWTDNGLWAL | 775 |
| SWDEKGLWSA | 776 |
| SWDSSGLWMD | 777 |

TABLE 13
Mdm/hdm antagonist peptide sequences

| | SEQ |
|---|---|
| | ID |
| Sequence/structure | NO: |
| TFSDLW | 778 |
| QETFSDLWKLLP | 779 |
| QPTFSDLWKLLP | 780 |
| QETFSDYWKLLP | 781 |
| QPTFSDYWKLLP | 782 |
| MPRFMDYWEGLN | 783 |
| VQNFIDYWTQQF | 784 |
| TGPAFTHYWATF | 785 |
| IDRAPTFRDHWFALV | 786 |
| PRPALVFADYWETLY | 787 |
| PAFSRFWSDLSAGAH | 788 |
| PAFSRFWSKLSAGAH | 789 |
| PXFXDYWXXL | 790 |
| QETFSDLWKLLP | 791 |
| QPTFSDLWKLLP | 792 |
| QETFSDYWKLLP | 793 |
| QPTFSDYWKLLP | 794 |

TABLE 14
Calmodulin antagonist peptide sequences

| | SEQ |
|---|---|
| | ID |
| Sequence/structure | NO: |
| SCVKWGKKEFCGS | 795 |
| SCWKYWGKECGS | 796 |
| SCYEWGKLRWCGS | 797 |
| SCLRWGKWSNCGS | 798 |
| SCWRWGKYQICGS | 799 |
| SCVSWGALKLCGS | 800 |
| SCIRWGQNTFCGS | 801 |
| SCWQWGNLKICGS | 802 |
| SCVRWGQLSICGS | 803 |
| LKKFNARRKLKGAILTTMLAK | 804 |
| RRWKKNFIAVSAANRFKK | 805 |
| RKWQKTGHAVRAIGRLSS | 806 |
| INLKALAALAKKIL | 807 |
| KIWSILAPLGTTLVKLVA | 808 |
| LKKLLKLLKKLLKL | 809 |
| LKWKKLLKLLKKLLKKLL | 810 |
| AEWPSLTEIKTLSHFSV | 811 |
| AEWPSPTRVISTTYFGS | 812 |
| AELAHWPPVKTVLRSFT | 813 |
| AEGSWLQLLNLMKQMNN | 814 |
| AEWPSLTEIK | 815 |

TABLE 15

Mast cell antagonists/Mast cell protease
inhibitor peptide sequences

| | SEQ |
|---|---|
| | ID |
| Sequence/structure | NO: |
| SGSGVLKRPLPILPVTR | 816 |
| RWLSSRPLPPLPLPPRT | 817 |
| GSGSYDTLALPSLPLHPMSS | 818 |
| GSGSYDTRALPSLPLHPMSS | 819 |
| GSGSSGVTMYPKLPPHWSMA | 820 |
| GSGSSGVRMYPKLPPHWSMA | 821 |
| GSGSSSMRMVPTIPGSAKHG | 822 |
| RNR | NR |
| QT | NR |
| RQK | NR |
| NRQ | NR |
| RQK | NR |
| RNRQKT | 823 |
| RNRQ | 824 |
| RNRQK | 825 |
| NRQKT | 826 |
| RQKT | 827 |

TABLE 16
SH3 antagonist peptide sequences

| | SEQ |
|---|---|
| | ID |
| Sequence/structure | NO: |
| RPLPPLP | 828 |
| RELPPLP | 829 |
| SPLPPLP | 830 |
| GPLPPLP | 831 |
| RPLPIPP | 832 |
| RPLPIPP | 833 |
| RRLPPTP | 834 |
| RQLPPTP | 835 |
| RPLPSRP | 836 |
| RPLPTRP | 837 |
| SRLPPLP | 838 |
| RALPSPP | 839 |
| RRLPRTP | 840 |
| RPVPPIT | 841 |
| ILAPPVP | 842 |
| RPLPMLP | 843 |
| RPLPILP | 844 |
| RPLPSLP | 845 |
| RPLPSLP | 846 |
| RPLPMIP | 847 |
| RPLPLIP | 848 |
| RPLPPTP | 849 |
| RSLPPLP | 850 |
| RPQPPPP | 851 |
| RQLPIPP | 852 |
| XXXRPLPPLPXP | 853 |
| XXXRPLPPIPXX | 854 |
| XXXRPLPPLPXX | 855 |
| RXXRPLPPLPXP | 856 |
| RXXRPLPPLPPP | 857 |
| PPPYPPPPIPXX | 858 |
| PPPYPPPPVPXX | 859 |
| LXXRPLPXΨP | 860 |
| ΨXXRPLPXLP | 861 |
| PPXΘXPPPΨP | 862 |
| +PPΨPXKPXWL | 863 |
| RPXΨPΨR+SXP | 864 |
| PPVPPRPXXTL | 865 |
| ΨPΨLPΨK | 866 |
| +ΘDXPLPXLP | 867 |

TABLE 17

Somatostatin or cortistatin mimetic peptide
sequences

| | SEQ |
|---|---|
| | ID |
| Sequence/structure | NO: |
| X¹-X²-Asn-Phe-Phe-Trp-Lys-Thr-Phe-X³-Ser-X⁴ | 868 |
| Asp Arg Met Pro Cys Arg Asn Phe Phe Trp Lys Thr | 869 |
| Phe Ser Ser Cys Lys | |
| Met Pro Cys Arg Asn Phe Phe Trp Lys Thr Phe Ser | 870 |
| Ser Cys Lys | |
| Cys Arg Asn Phe Phe Trp Lys Thr Phe Ser Ser Cys | 871 |
| Lys | |
| Asp Arg Met Pro Cys Arg Asn Phe Phe Trp Lys Thr | 872 |
| Phe Ser Ser Cys | |
| Met Pro Cys Arg Asn Phe Phe Trp Lys Thr Phe Ser | 873 |
| Ser Cys | |
| Cys Arg Asn Phe Phe Trp Lys Thr Phe Ser Ser Cys | 874 |
| Asp Arg Met Pro Cys Lys Asn Phe Phe Trp Lys Thr | 875 |
| Phe Ser Ser Cys | |
| Met Pro Cys Lys Asn Phe Phe Trp Lys Thr Phe Ser | 876 |
| Ser Cys Lys | |
| Cys Lys Asn Phe Phe Trp Lys Thr Phe Ser Ser Cys | 877 |
| Lys | |
| Asp Arg Met Pro Cys Lys Asn Phe Phe Trp Lys Thr | 878 |
| Phe Ser Ser Cys | |
| Met Pro Cys Lys Asn Phe Phe Trp Lys Thr Phe Ser | 879 |
| Ser Cys | |
| Cys Lys Asn Phe Phe Trp Lys Thr Phe Ser Ser Cys | 880 |
| Asp Arg Met Pro Cys Arg Asn Phe Phe Trp Lys Thr | 881 |
| Phe Thr Ser Cys Lys | |
| Met Pro Cys Arg Asn Phe Phe Trp Lys Thr Phe Thr | 882 |
| Ser Cys Lys | |
| Cys Arg Asn Phe Phe Trp Lys Thr Phe Thr Ser Cys | 883 |
| Lys | |
| Asp Arg Met Pro Cys Arg Asn Phe Phe Trp Lys Thr | 884 |
| Phe Thr Ser Cys | |
| Met Pro Cys Arg Asn Phe Phe Trp Lys Thr Phe Thr | 885 |
| Ser Cys | |
| Cys Arg Asn Phe Phe Trp Lys Thr Phe Thr Ser Cys | 886 |
| Asp Arg Met Pro Cys Lys Asn Phe Phe Trp Lys Thr | 887 |
| Phe Thr Ser Cys Lys | |
| Met Pro Cys Lys Asn Phe Phe Trp Lys Thr Phe Thr | 888 |
| Ser Cys Lys | |
| Cys Lys Asn Phe Phe Trp Lys Thr Phe Thr Ser Cys | 889 |
| Lys | |
| Asp Arg Met Pro Cys Lys Asn Phe Phe Trp Lys Thr | 890 |
| Phe Thr Ser Cys | |
| Met Pro Cys Lys Asn Phe Phe Trp Lys Thr Phe Thr | 891 |
| Ser Cys | |
| Cys Lys Asn Phe Phe Trp Lys Thr Phe Thr Ser Cys | 892 |

TABLE 18
UKR antagonist peptide sequences

| | |
|---|---|
| | SEQ |
| | ID |
| Sequence/structure | NO: |

| | |
|---|---|
| AEPMPHSLNFSQYLWYT | 893 |
| AEHTYSSLWDTYSPLAF | 894 |
| AELDLWMRHYPLSFSNR | 895 |
| AESSLWTRYAWPSMPSY | 896 |
| AEWHPGLSFGSYLWSKT | 897 |
| AEPALLNWSFFFNPGLH | 898 |
| AEWSFYNLHLPEPQTIF | 899 |
| AEPLDLWSLYSLPPLAM | 900 |
| AEPTLWQLYQFPLRLSG | 901 |
| AEISFSELMWLRSTPAF | 902 |
| AELSEADLWTTWFGMGS | 903 |
| AESSLWRIFSPSALMMS | 904 |
| AESLPTLTSILWGKESV | 905 |
| AETLFMDLWHDKHILLT | 906 |
| AEILNFPLWHEPLWSTE | 907 |
| AESQTGTLNTLFWNTLR | 908 |
| AEPVYQYELDSYLRSYY | 909 |
| AELDLSTFYDIQYLLRT | 910 |
| AEFFKLGPNGYVYLHSA | 911 |
| FKLXXXGYVYL | 912 |
| AESTYHHLSLGYMYTLN | 913 |
| YHXLXXGYMYT | 914 |

TABLE 19

Macrophage and/or T-cell inhibiting peptide
sequences

| | SEQ |
|---|---|
| | ID |
| Sequence/structure | NO: |
| Xaa-Yaa-Arg | NR |
| Arg-Yaa-Xaa | NR |
| Xaa-Arg-Yaa | NR |
| Yaa-Arg-Xaa | NR |
| Ala-Arg | NR |
| Arg-Arg | NR |
| Asn-Arg | NR |
| Asp-Arg | NR |
| Cys-Arg | NR |
| Gln-Arg | NR |
| Glu-Arg | NR |
| Gly-Arg | NR |
| His-arg | NR |
| Ile-Arg | NR |
| Leu-Arg | NR |
| Lys-Arg | NR |
| Met-Arg | NR |
| Phe-Arg | NR |
| Ser-Arg | NR |
| Thr-Arg | NR |
| Trp-Arg | NR |
| Tyr-Arg | NR |
| Val-Arg | NR |
| Ala-Glu-Arg | NR |
| Arg-Glu-Arg | NR |
| Asn-Glu-Arg | NR |
| Asp-Glu-Arg | NR |
| Cys-Glu-Arg | NR |
| Gln-Glu-Arg | NR |
| Glu-Glu-Arg | NR |
| Gly-Glu-Arg | NR |
| His-Glu-Arg | NR |
| Ile-Glu-Arg | NR |
| Leu-Glu-Arg | NR |
| Lys-Glu-Arg | NR |
| Met-Glu-Arg | NR |
| Phe-Glu-Arg | NR |
| Pro-Glu-Arg | NR |
| Ser-Glu-Arg | NR |
| Thr-Glu-Arg | NR |
| Trp-Glu-Arg | NR |
| Tyr-Glu-Arg | NR |
| Val-Glu-Arg | NR |
| Arg-Ala | NR |
| Arg-Asp | NR |
| Arg-Cys | NR |
| Arg-Gln | NR |
| Arg-Glu | NR |
| Arg-Gly | NR |
| Arg-His | NR |
| Arg-Ile | NR |
| Arg-Leu | NR |
| Arg-Lys | NR |
| Arg-Met | NR |
| Arg-Phe | NR |
| Arg-Pro | NR |
| Arg-Ser | NR |
| Arg-Thr | NR |
| Arg-Trp | NR |
| Arg-Tyr | NR |
| Arg-Val | NR |
| Arg-Glu-Ala | NR |
| Arg-Glu-Asn | NR |
| Arg-Glu-Asp | NR |
| Arg-Glu-Cys | NR |
| Arg-Glu-Gln | NR |
| Arg-Glu-Glu | NR |
| Arg-Glu-Gly | NR |
| Arg-Glu-His | NR |
| Arg-Glu-Ile | NR |
| Arg-Glu-Leu | NR |
| Arg-Glu-Lys | NR |
| Arg-Glu-Met | NR |
| Arg-Glu-Phe | NR |
| Arg-Glu-Pro | NR |
| Arg-Glu-Ser | NR |
| Arg-Glu-Thr | NR |
| Arg-Glu-Trp | NR |
| Arg-Glu-Tyr | NR |
| Arg-Glu-Val | NR |
| Ala-Arg-Glu | NR |
| Arg-Arg-Glu | NR |
| Asn-Arg-Glu | NR |
| Asp-Arg-Glu | NR |
| Cys-Arg-Glu | NR |
| Gln-Arg-Glu | NR |
| Glu-Arg-Glu | NR |
| Gly-Arg-Glu | NR |
| His-Arg-Glu | NR |
| IIe-Arg-Glu | NR |
| Leu-Arg-Glu | NR |
| Lys-Arg-Glu | NR |
| Met-Arg-Glu | NR |
| Phe-Arg-Glu | NR |
| Pro-Arg-Glu | NR |
| Ser-Arg-Glu | NR |
| Thr-Arg-Glu | NR |
| Trp-Arg-Glu | NR |
| Tyr-Arg-Glu | NR |
| Val-Arg-Glu | NR |
| Glu-Arg-Ala, | NR |
| Glu-Arg-Arg | NR |
| Glu-Arg-Asn | NR |
| Glu-Arg-Asp | NR |
| Glu-Arg-Cys | NR |
| Glu-Arg-Gln | NR |
| Glu-Arg-Gly | NR |
| Glu-Arg-His | NR |
| Glu-Arg-Ile | NR |
| Glu-Arg-Leu | NR |
| Glu-Arg-Lys | NR |
| Glu-Arg-Met | NR |
| Glu-Arg-Phe | NR |
| Glu-Arg-Pro | NR |
| Glu-Arg-Ser | NR |
| Glu-Arg-Thr | NR |
| Glu-Arg-Trp | NR |
| Glu-Arg-Tyr | NR |
| Glu-Arg-Val | NR |

TABLE 20

Additional Exemplary Pharmacologically Active
Peptides

| | SEQ | |
|---|---|---|
| | ID | |
| Sequence/structure | NO: | Activity |
| VEPNCDIHVMWEWECFERL | 915 | VEGF-antagonist |
| GERWCFDGPLTWVCGEES | 916 | VEGF-antagonist |
| RGWVEICVADDNGMCVTEAQ | 917 | VEGF-antagonist |
| GWDECDVARMWEWECFAGV | 918 | VEGF-antagonist |
| GERWCFDGPRAWVCGWEI | 919 | VEGF-antagonist |
| EELWCFDGPRAWVCGYVK | 920 | VEGF-antagonist |
| RGWVEICAADDYGRCLTEAQ | 921 | VEGF-antagonist |
| RGWVEICESDVWGRCL | 922 | VEGF-antagonist |
| RGWVEICESDVWGRCL | 923 | VEGF-antagonist |
| GGNECDIARMWEWECFERL | 924 | VEGF-antagonist |
| RGWVEICAADDYGRCL | 925 | VEGF-antagonist |
| CTTHWGFTLC | 926 | MMP inhibitor |
| CLRSGXGC | 927 | MMP inhibitor |
| CXXHWGFXXC | 928 | MMP inhibitor |
| CXPXC | 929 | MMP inhibitor |
| CRRHWGFEFC | 930 | MMP inhibitor |
| STTHWGFTLS | 931 | MMP inhibitor |
| CSLHWGFWWC | 932 | CTLA4-mimetic |
| GFVCSGIFAVGVGRC | 933 | CTLA4-mimetic |
| APGVRLGCAVLGRYC | 934 | CTLA4-mimetic |
| LLGRMK | 935 | Antiviral (HBV) |
| ICVVQDWGHHRCTAGHMANLTSHASAI | 936 | C3b antagonist |
| ICVVQDWGHHRCT | 937 | C3b antagonist |
| CVVQDWGHHAC | 938 | C3b antagonist |
| STGGFDDVYDWARGVSSALTTTLVATR | 939 | Vinculin-binding |
| STGGFDDVYDWARRVSSALTTTLVATR | 940 | Vinculin-binding |
| SRGVNFSEWLYDMSAAMKEASNVFPSRRS | 941 | Vinculin-binding |
| R | | |
| SSQNWDMEAGVEDLTAAMLGLLSTIHSSS | 942 | Vinculin-binding |
| R | | |
| SSPSLYTQFLVNYESAATRIQDLLIASRP | 943 | Vinculin-binding |
| SR | | |
| SSTGWVDLLGALQRAADATRTSIPPSLQN | 944 | Vinculin-binding |
| SR | | |
| DVYTKKELIECARRVSEK | 945 | Vinculin-binding |
| EKGSYYPGSGIAQFHIDYNNVS | 946 | C4BP-binding |
| SGIAQFHIDYNNVSSAEGWHVN | 947 | C4BP-binding |
| LVTVEKGSYYPGSGIAQFHIDYNNVSSAE | 948 | C4BP-binding |
| GWHVN | | |
| SGIAQFHIDYNNVS | 949 | C4BP-binding |
| LLGRMK | 950 | anti-HBV |
| ALLGRMKG | 951 | anti-HBV |
| LDPAFR | 952 | anti-HBV |
| CXXRGDC | 953 | Inhibition of |
| | | platelet |
| | | aggregation |
| RPLPPLP | 954 | Src antagonist |
| PPVPPR | 955 | Src antagonist |
| XFXDXWXXLXX | 956 | Anti-cancer |
| | | (particularly |
| | | for sarcomas) |
| KACRRLFGPVDSEQLSRDCD | 957 | p16-mimetic |
| RERWNFDFVTETPLEGDFAW | 958 | p16-mimetic |
| KRRQTSMTDFYHSKRRLIFS | 959 | p16-mimetic |
| TSMTDFYHSKRRLIFSKRKP | 960 | p16-mimetic |
| RRLIF | 961 | p16-mimetic |
| KRRQTSATDFYHSKRRLIFSRQIKIWFQN | 962 | p16-mimetic |
| RRMKWKK | | |
| KRRLLFSKRQLKIWFQNRRMKWKK | 963 | p16-mimetic |
| Asn Gln Gly Arg His Phe Cys | 964 | CAP37 mimetic/LPS |
| Gly Gly Ala Leu Ile His Ala | | binding |
| Arg Phe Val Met Thr Ala Ala | | |
| Ser Cys Phe Gln | | |
| Arg His Phe Cys Giy Gly Ala | 965 | CAP37 mimetic/LPS |
| Leu Ile His Ala Arg Phe Val | | binding |
| Met Thr Ala Ala Ser Cys | | |
| Gly Thr Arg Cys Gln Val Ala | 966 | CAP37 mimetic/LPS |
| Gly Trp Gly Ser Gln Arg Ser | | binding |
| Gly Gly Arg Leu Ser Arg Phe | | |
| Pro Arg Phe Val Asn Val | | |
| WHWRHRIPLQLAAGR | 967 | carbohydrate (GDI |
| | | alpha) mimetic |
| LKTPRV | 968 | β2GPI Ab binding |
| NTLKTPRV | 969 | β2GPI Ab binding |
| NTLKTPRVGGC | 970 | β2GPI Ab binding |
| KDKATF | 971 | β2GPI Ab binding |
| KDKATFGCHD | 972 | β2GPI Ab binding |
| KDKATFGCHDGC | 973 | β2GPI Ab binding |
| TLRVYK | 974 | β2GPI Ab binding |
| ATLRVYKGG | 975 | β2GPI Ab binding |
| CATLRVYKGG | 976 | β2GPI Ab binding |
| INLKALAALAKKIL | 977 | Membrane- |
| | | transporting |
| GWT | NR | Membrane- |
| | | transporting |
| GWTLNSAGYLLG | 978 | Membrane- |
| | | transporting |
| GWTLNSAGYLLGKINLKALAALAKKIL | 979 | Membrane- |
| | | transporting |
| CVHAYRS | 980 | Antiproliferative, |
| | | antiviral |
| CVHAYRA | 981 | Antiproliferative, |
| | | antiviral |
| CVHAPRS | 982 | Antiproliferative, |
| | | antiviral |
| CVHAPRA | 983 | Antiproiiferative, |
| | | antiviral |
| CVHSYRS | 984 | Antiproliferative, |
| | | antiviral |
| CVHSYRA | 985 | Antiproliferative, |
| | | antiviral |
| CVHSPRS | 986 | Antiproliferative, |
| | | antiviral |
| CVHSPRA | 987 | Antiproliferative, |
| | | antiviral |
| CVHTYRS | 988 | Antiproliferative, |
| | | antiviral |
| CVHTYRA | 989 | Antiproliferative, |
| | | antiviral |
| CVHTPRS | 990 | Antiproliferative, |
| | | antiviral |
| CVHTPRA | 991 | Antiproliferative, |
| | | antiviral |
| HWAWFK | 992 | anti-ischemic, |
| | | growth hormone- |
| | | liberating |

TABLE 21
MYOSTATIN INHIBITOR PEPTIDES

| | SEQ | |
|---|---|---|
| PEPTIBODY NAME | ID | PEPTIDE SEQUENCE |
| Myostatin-TN8-Con1 | 1036 | KDKCKMWHWMCKPP |
| Myostatin-TN8-Con2 | 1037 | KDLCAMWHWMCKPP |
| Myostatin-TN8-Con3 | 1038 | KDLCKMWKWMCKPP |
| Myostatin-TN8-Con4 | 1039 | KDLCKMWHWMCKPK |
| Myostatin-TN8-Con5 | 1040 | WYPCYEFHFWCYDL |
| Myostatin-TN8-Con6 | 1041 | WYPCYEGHFWCYDL |
| Myostatin-TN8-Con7 | 1042 | IFGCKWWDVQCYQF |
| Myostatin-TN8-Con8 | 1043 | IFGCKWWDVDCYQF |
| Myostatin-TN8-Con9 | 1044 | ADWCVSPNWFCMVM |
| Myostatin-TN8-Con10 | 1045 | HKFCPWWALFCWDF |
| Myostatin-TN8-1 | 1046 | KDLCKMWHWMCKPP |
| Myostatin-TN8-2 | 1047 | IDKCAIWGWMCPPL |
| Myostatin-TN8-3 | 1048 | WYPCGEFGMWCLNV |
| Myostatin-TN8-4 | 1049 | WFTCLWNCDNE |
| Myostatin-TN8-5 | 1050 | HTPCPWFAPLCVEW |
| Myostatin-TN8-6 | 1051 | KEWCWRWKWMCKPE |
| Myostatin-TN8-7 | 1052 | FETCPSWAYFCLDI |
| Myostatin-TN8-8 | 1053 | AYKCEANDWGCWWL |
| Myostatin-TN8-9 | 1054 | NSWCEDQWHRCWWL |
| Myostatin-TN8-10 | 1055 | WSACYAGHFWCYDL |
| Myostatin-TN8-11 | 1056 | ANWCVSPNWFCMVM |
| Myostatin-TN8-12 | 1057 | WTECYQQEFWCWNL |
| Myostatin-TN8-13 | 1058 | ENTCERWKWMCPPK |
| Myostatin-TN8-14 | 1059 | WLPCHQEGFWCMNF |
| Myostatin-TN8-15 | 1060 | STMCSQWHWMCNPF |
| Myostatin-TN8-16 | 1061 | IFGCHWWDVDCYQF |
| Myostatin-TN8-17 | 1062 | IYGCKWWDIQCYDI |
| Myostatin-TN8-18 | 1063 | PDWCIDPDWWCKFW |
| Myostatin-TN8-19 | 1064 | QGHCTRWPWMCPPY |
| Myostatin-TN8-20 | 1065 | WQECYREGFWCLQT |
| Myostatin-TN8-21 | 1066 | WFDCYGPGFKCWSP |
| Myostatin-TN8-22 | 1067 | GVRCPKGHLWCLYP |
| Myostatin-TN8-23 | 1068 | HWACGYWPWSCKWV |
| Myostatin-TN8-24 | 1069 | GPACHSPWWWCVFG |
| Myostatin-TN8-25 | 1070 | TTWCISPMWFCSQQ |
| Myostatin-TN8-26 | 1071 | HKFCPPWAIFCWDF |
| Myostatin-TN8-27 | 1072 | PDWCVSPRWYCNMW |
| Myostatin-TN8-28 | 1073 | VWKCHWFGMDCEPT |
| Myostatin-TN8-29 | 1074 | KKHCQIWTWMCAPK |
| Myostatin-TN8-30 | 1075 | WFQCGSTLFWCYNL |
| Myostatin-TN8-31 | 1076 | WSPCYDHYFYCYTI |
| Myostatin-TN8-32 | 1077 | SWMCGFFKEVCMWV |
| Myostatin-TN8-33 | 1078 | EMLCMIHPVFCNPH |
| Myostatin-TN8-34 | 1079 | LKTCNLWPWMCPPL |
| Myostatin-TN8-35 | 1080 | VVGCKWYEAWCYNK |
| Myostatin-TN8-36 | 1081 | PIHCTQWAWMCPPT |
| Myostatin-TN8-37 | 1082 | DSNCPWYFLSCVIF |
| Myostatin-TN8-38 | 1083 | HIWCNLAMMXCVEM |
| Myostatin-TN8-39 | 1084 | NLQCIYFLGKCIYF |
| Myostatin-TN8-40 | 1085 | AWRCMWFSDVCTPG |
| Myostatin-TN8-41 | 1086 | WFRCFLDADWCTSV |
| Myostatin-TN8-42 | 1087 | EKICQMWSWMCAPP |
| Myostatin-TN8-43 | 1088 | WFYCHLNKSECTEP |
| Myostatin-TN8-44 | 1089 | FWRCAIGIDKCKRV |
| Myostatin-TN8-45 | 1090 | NLGCKWYEVWCFTY |
| Myostatin-TN8-46 | 1091 | IDLCNMWDGMCYPP |
| Myostatin-TN8-47 | 1092 | EMPCNIWGWMCPPV |
| Myostatin-TN12-1 | 1093 | WFRCVLTGIVDWSECFGL |
| Myostatin-TN12-2 | 1094 | GFSCTFGLDEFYVDCSPF |
| Myostatin-TN12-3 | 1095 | LPWCHDQVNADWGFCMLW |
| Myostatin-TN12-4 | 1096 | YPTCSEKFWIYGQTCVLW |
| Myostatin-TN12-5 | 1097 | LGPCPIHHGPWPQYCVYW |
| Myostatin-TN12-6 | 1098 | PFPCETHQISWLGHCLSF |
| Myostatin-TN12-7 | 1099 | HWGCEDLMWSWHPLCRRLP |
| Myostatin-TN12-8 | 1100 | LPLCDADMMPTIGFCVAY |
| Myostatin-TN12-9 | 1101 | SHWCETTFWMNYAKCVHA |
| Myostatin-TN12-10 | 1102 | LPKCTHVPFDQGGFCLWY |
| Myostatin-TN12-11 | 1103 | FSSCWSPVSRQDMFCVFY |
| Myostatin-TN12-13 | 1104 | SHKCEYSGWLQPLCYRP |
| Myostatin-TN12-14 | 1105 | PWWCQDNYVQHMLHCDSP |
| Myostatin-TN12-15 | 1106 | WFRCMLMNSFDAFQCVSY |
| Myostatin-TN12-16 | 1107 | PDACRDQPWYMFMGCMLG |
| Myostatin-TN12-17 | 1108 | FLACFVEFELCFDS |
| Myostatin-TN12-18 | 1109 | SAYCIITESDPYVLCVPL |
| Myostatin-TN12-19 | 1110 | PSICESYSTMWLPMCQHN |
| Myostatin-TN12-20 | 1111 | WLDCHDDSWAWTKMCRSH |
| Myostatin-TN12-21 | 1112 | YLNCVMMNTSPFVECVFN |
| Myostatin-TN12-22 | 1113 | YPWCDGFMIQQGITCMFY |
| Myostatin-TN12-23 | 1114 | FDYCTWLNGFKDWKCWSR |
| Myostatin-TN12-24 | 1115 | LPLCNLKEISHVQACVLF |
| Myostatin-TN12-25 | 1116 | SPECAFARWLGIEQCQRD |
| Myostatin-TN12-26 | 1117 | YPQCFNLHLLEWTECDWF |
| Myostatin-TN12-27 | 1118 | RWRCEIYDSEFLPKCWFF |
| Myostatin-TN12-28 | 1119 | LVGCDNVWHRCKLF |
| Myostatin-TN12-29 | 1120 | AGWCHVWGEMFGMGCSAL |
| Myostatin-TN12-30 | 1121 | HHECEWMARWMSLDCVGL |
| Myostatin-TN12-31 | 1122 | FPMCGIAGMKDFDFCVWY |
| Myostatin-TN12-32 | 1123 | RDDCTFWPEWLWKLCERP |
| Myostatin-TN12-33 | 1124 | YNFCSYLFGVSKEACQLP |
| Myostatin-TN12-34 | 1125 | AHWCEQGPWRYGNICMAY |
| Myostatin-TN12-35 | 1126 | NLVCGKISAWGDEACARA |
| Myostatin-TN12-36 | 1127 | HNVCTIMGPSMKWFCWND |
| Myostatin-TN12-37 | 1128 | NDLCAMWGWRNTIWCQNS |
| Myostatin-TN12-38 | 1129 | PPFCQNDNDMLQSLCKLL |
| Myostatin-TN12-39 | 1130 | WYDCNVPNELLSGLCRLF |
| Myostatin-TN12-40 | 1131 | YGDCDQNHWMWPFTCLSL |
| Myostatin-TN12-41 | 1132 | GWMCHFDLHDWGATCQPD |
| Myostatin-TN12-42 | 1133 | YFHCMFGGHEFEVHCESF |
| Myostatin-TN12-43 | 1134 | AYWCWHGQCVRF |
| Myostatin-Linear-1 | 1135 | SEHWTFTDWDGNEWWVRPF |
| Myostatin-Linear-2 | 1136 | MEMLDSLFELLKDMVPISKA |
| Myostatin-Linear-3 | 1137 | SPPEEALMEWLGWQYGKFT |
| Myostatin-Linear-4 | 1138 | SPENLLNDLYILMTKQEWYG |
| Myostatin-Linear-5 | 1139 | FHWEEGIPFHVVTPYSYDRM |
| Myostatin-Linear-6 | 1140 | KRLLEQFMNDLAELVSGHS |
| Myostatin-Linear-7 | 1141 | DTRDALFQEFYEFVRSRLVI |
| Myostatin-Linear-8 | 1142 | RMSAAPRPLTYRDIMDQYWH |
| Myostatin-Linear-9 | 1143 | NDKAHFFEMFMFDVHNFVES |
| Myostatin-Linear-10 | 1144 | QTQAQKIDGLWELLQSIRNQ |
| Myostatin-Linear-11 | 1145 | MLSEFEEFLGNLVHRQEA |
| Myostatin-Linear-12 | 1146 | YTPKMGSEWTSFWHNRIHYL |
| Myostatin-Linear-13 | 1147 | LNDTLLRELKMVLNSLSDMK |
| Myostatin-Linear-14 | 1148 | FDVERDLMRWLEGFMQSAAT |
| Myostatin-Linear-15 | 1149 | HHGWNYLRKGSAPQWFEAWV |
| Myostatin-Linear-16 | 1150 | VESLHQLQMWLDQKLASGPH |
| Myostatin-Linear-17 | 1151 | RATLLKDFWQLVEGYGDN |
| Myostatin-Linear-18 | 1152 | EELLREFYRFVSAFDY |
| Myostatin-Linear-19 | 1153 | GLLDEFSHFIAEQFYQMPGG |
| Myostatin-Linear-20 | 1154 | YREMSMLEGLLDVLERLQHY |
| Myostatin-Linear-21 | 1155 | HNSSQMLLSELIMLVGSMMQ |
| Myostatin-Linear-22 | 1156 | WREHFLNSDYIRDKLIAIDG |
| Myostatin-Linear-23 | 1157 | QFPFYVFDDLPAQLEYWIA |
| Myostatin-Linear-24 | 1158 | EFFHWLHNHRSEVNHWLDMN |
| Myostatin-Linear-25 | 1159 | EALFQNFFRDVLTLSEREY |
| Myostatin-Linear-26 | 1160 | QYWEQQWMTYFRENGLHVQY |
| Myostatin-Linear-27 | 1161 | NQRMMLEDLWRIMTPMFGRS |
| Myostatin-Linear-29 | 1162 | FLDELKAELSRHYALDDLDE |
| Myostatin-Linear-30 | 1163 | GKLIEGLLNELMQLETFMPD |
| Myostatin-Linear-31 | 1164 | ILLLDEYKKDWKSWF |
| Myostatin-2xTN8-19 kc | 1165 | QGHCTRWPWMCPPYGSGSATG |
| | | GSGSTASSGSGSATGQGHCTR |
| | | WPWMCPPY |
| Myostatin-2xTN8-con6 | 1166 | WYPCYEGHFWCYDLGSGSTAS |
| | | SGSGSATGWYPCYEGHFWCYD |
| | | L |
| Myostatin-2xTN8-5 kc | 1167 | HTPCPWFAPLCVEWGSGSATG |
| | | GSGSTASSGSGSATGHTPCPW |
| | | FAPLCVEW |
| Myostatin-2xTN8-18 kc | 1168 | PDWCIDPDWWCKFWGSGSATG |
| | | GSGSTASSGSGSATGPDWCID |
| | | PDWWCKFW |
| Myostatin-2xTN8-11 kc | 1169 | ANWCVSPNWFCMVMGSGSATG |
| | | GSGSTASSGSGSATGANWCVS |
| | | PNWFCMVM |
| Myostatin-2xTN8-25 kc | 1170 | PDWCIDPDWWCKFWGSGSATG |
| | | GSGSTASSGSGSATGPDWCID |
| | | PDWWCKFW |
| Myostatin-2xTN8-23 kc | 1171 | HWACGYWPWSCKWVGSGSATG |
| | | GSGSTASSGSGSATGHWACGY |
| | | WPWSCKWV |
| Myostatin-TN8-29-19 kc | 1172 | KKHCQIWTWMCAPKGSGSATG |
| | | GSGSTASSGSGSATGQGHCTR |
| | | WPWMCPPY |
| Myostatin-TN8-19-29 kc | 1173 | QGHCTRWPWMCPPYGSGSATG |
| | | GSGSTASSGSGSATGKKHCQI |
| | | WTWMCAPK |
| Myostatin-TN8-29-19 kn | 1174 | KKHCQIWTWMCAPKGSGSATG |
| | | GSGSTASSGSGSATGQGHCTR |
| | | WPWMCPPY |
| Myostatin-TN8-29-19-8 g | 1175 | KKHCQIWTWMCAPKGGGGGGG |
| | | GQGHCTRWPWMCPPY |
| Myostatin-TN8-19-29-6 gc | 1176 | QGHCTRWPWMCPPYGGGGGGK |
| | | KHCQIWTWMCAPK |

TABLE 22
MYOSTATIN INHIBITOR PEPTIDES

| Affinity- | SEQ | |
|---|---|---|
| matured | ID | |
| peptibody | NO: | Peptide sequence |
| mTN8-19-1 | 1177 | VALHGQCTRWPWMCPPQREG |
| mTN8-19-2 | 1178 | YPEQGLCTRWPWMCPPQTLA |
| mTN8-19-3 | 1179 | GLNQGHCTRWPWMCPPQDSN |
| mTN8-19-4 | 1180 | MITQGQCTRWPWMCPPQPSG |
| mTN8-19-5 | 1181 | AGAQEHCTRWPWMCAPNDWI |
| mTN8-19-6 | 1182 | GVNQGQCTRWRWMCPPNGWE |
| mTN8-19-7 | 1183 | LADHGQCIRWPWMCPPEGWE |
| mTN8-19-8 | 1184 | ILEQAQCTRWPWMCPPQRGG |
| mTN8-19-9 | 1185 | TQTHAQCTRWPWMCPPQWEG |
| mTN8-19-10 | 1186 | VVTQGHCTLWPWMCPPQRWR |
| mTN8-19-11 | 1187 | IYPHDQCTRWPWMCPPQPYP |
| mTN8-19-12 | 1188 | SYWQGQCTRWPWMCPPQWRG |
| mTN8-19-13 | 1189 | MWQQGHCTRWPWMCPPQGWG |
| mTN8-19-14 | 1190 | EFTQWHCTRWPWMCPPQRSQ |
| mTN8-19-15 | 1191 | LDDQWQCTRWPWMCPPQGFS |
| mTN8-19-16 | 1192 | YQTQGLCTRWPWMCPPQSQR |
| mTN8-19-17 | 1193 | ESNQGQCTRWPWMCPPQGGW |
| mTN8-19-18 | 1194 | WTDRGPCTRWPWMCPPQANG |
| mTN8-19-19 | 1195 | VGTQGQCTRWPWMCPPYETG |
| mTN8-19-20 | 1196 | PYEQGKCTRWPWMCPPYEVE |
| mTN8-19-21 | 1197 | SEYQGLCTRWPWMCPPQGWK |
| mTN8-19-22 | 1198 | TFSQGHCTRWPWMCPPQGWG |
| mTN8-19-23 | 1199 | PGAHDHCTRWPWMCPPQSRY |
| mTN8-19-24 | 1200 | VAEEWHCRRWPWMCPPQDWR |
| mTN8-19-25 | 1201 | VGTQGHCTRWPWMCPPQPAG |
| mTN8-19-26 | 1202 | EEDQAHCRSWPWMCPPQGWV |
| mTN8-19-27 | 1203 | ADTQGHCTRWPWMCPPQHWF |
| mTN8-19-28 | 1204 | SGPQGHCTRWPWMCAPQGWF |
| mTN8-19-29 | 1205 | TLVQGHCTRWPWMCPPQRWV |
| mTN8-19-30 | 1206 | GMAHGKCTRWAWMCPPQSWK |
| mTN8-19-31 | 1207 | ELYHGQCTRWPWMCPPQSWA |
| mTN8-19-32 | 1208 | VADHGHCTRWPWMCPPQGWG |
| mTN8-19-33 | 1209 | PESQGHCTRWPWMCPPQGWG |
| mTN8-19-34 | 1210 | IPAHGHCTRWPWMCPPQRWR |
| mTN8-19-35 | 1211 | FTVHGHCTRWPWMCPPYGWV |
| mTN8-19-36 | 1212 | PDFPGHCTRWRWMCPPQGWE |
| mTN8-19-37 | 1213 | QLWQGPCTQWPWMCPPKGRY |
| mTN8-19-38 | 1214 | HANDGHCTRWQWMCPPQWGG |
| mTN8-19-39 | 1215 | ETDHGLCTRWPWMCPPYGAR |
| mTN8-19-40 | 1216 | GTWQGLCTRWPWMCPPQGWQ |
| mTN8-19 con1 | 1217 | VATQGQCTRWPWMCPPQGWG |
| mTN8-19 con2 | 1218 | VATQGQCTRWPWMCPPQRWG |
| mTN8 con6-1 | 1219 | QREWYPCYGGHLWCYDLHKA |
| mTN8 con6-2 | 1220 | ISAWYSCYAGHFWCWDLKQK |
| mTN8 con6-3 | 1221 | WTGWYQCYGGHLWCYDLRRK |
| mTN8 con6-4 | 1222 | KTFWYPCYDGHFWCYNLKSS |
| mTN8 con6-5 | 1223 | ESRWYPCYEGHLWCFDLTET |

TABLE 23
MYOSTATIN INHIBITOR PEPTIDES

| Affinity | SEQ | |
|---|---|---|
| matured | ID | |
| peptibody | NO: | Peptide Sequence |
| L2 | 1224 | MEMLDSLFELLKDMVPISKA |
| mL2-Con1 | 1225 | RMEMLESLLELLKEIVPMSKAG |
| mL2-Con2 | 1226 | RMEMLESLLELLKEIVPMSKAR |
| mL2-1 | 1227 | RMEMLESLLELLKDIVPMSKPS |
| mL2-2 | 1228 | GMEMLESLFELLQEIVPMSKAP |
| mL2-3 | 1229 | RMEMLESLLELLKDIVPISNPP |
| mL2-4 | 1230 | RIEMLESLLELLQEIVPISKAE |
| mL2-5 | 1231 | RMEMLQSLLELLKDIVPMSNAR |
| mL2-6 | 1232 | RMEMLESLLELLKEIVPTSNGT |
| mL2-7 | 1233 | RMEMLESLFELLKEIVPMSKAG |
| mL2-8 | 1234 | RMEMLGSLLELLKEIVPMSKAR |
| mL2-9 | 1235 | QMELLDSLFELLKEIVPKSQPA |
| mL2-10 | 1236 | RMEMLDSLLELLKEIVPMSNAR |
| mL2-11 | 1237 | RMEMLESLLELLHEIVPMSQAG |
| mL2-12 | 1238 | QMEMLESLLQLLKEIVPMSKAS |
| mL2-13 | 1239 | RMEMLDSLLELLKDMVPMTTGA |
| mL2-14 | 1240 | RIEMLESLLELLKDMVPMANAS |
| mL2-15 | 1241 | RMEMLESLLQLLNEIVPMSRAR |
| mL2-16 | 1242 | RMEMLESLFDLLKELVPMSKGV |
| mL2-17 | 1243 | RIEMLESLLELLKDIVPIQKAR |
| mL2-18 | 1244 | RMELLESLFELLKDMVPMSDSS |
| mL2-19 | 1245 | RMEMLESLLEVLQEIVPRAKGA |
| mL2-20 | 1246 | RMEMLDSLLQLLNEIVPMSHAR |
| mL2-21 | 1247 | RMEMLESLLELLKDIVPMSNAG |
| mL2-22 | 1248 | RMEMLQSLFELLKGMVPISKAG |
| mL2-23 | 1249 | RMEMLESLLELLKEIVPNSTAA |
| mL2-24 | 1250 | RMEMLQSLLELLKEIVPISKAG |
| mL2-25 | 1251 | RIEMLDSLLELLNELVPMSKAR |
| L-15 | 1252 | HHGWNYLRKGSAPQWFEAWV |
| mL15-con1 | 1253 | QVESLQQLLMWLDQKLASGPQG |
| mL15-1 | 1254 | RMELLESLFELLKEMVPRSKAV |
| mL15-2 | 1255 | QAVSLQHLLMWLDQKLASGPQH |
| mL15-3 | 1256 | DEDSLQQLLMWLDQKLASGPQL |
| mL15-4 | 1257 | PVASLQQLLIWLDQKLAQGPHA |
| mL15-5 | 1258 | EVDELQQLLNWLDHKLASGPLQ |
| mL15-6 | 1259 | DVESLEQLLMWLDHQLASGPHG |
| mL15-7 | 1260 | QVDSLQQVLLWLEHKLALGPQV |
| mL15-8 | 1261 | GDESLQHLLMWLEQKLALGPHG |
| mL15-9 | 1262 | QIEMLESLLDLLRDMVPMSNAF |
| mU15-10 | 1263 | EVDSLQQLLMWLDQKLASGPQA |
| mL15-11 | 1264 | EDESLQQLLIYLDKMLSSGPQV |
| mL15-12 | 1265 | AMDQLHQLLIWLDHKLASGPQA |
| mL15-13 | 1266 | RIEMLESLLELLDEIALIPKAW |
| mL15-14 | 1267 | EVVSLQHLLMWLEHKLASGPDG |
| mL15-15 | 1268 | GGESLQQLLMWLDQQLASGPQR |
| mL15-16 | 1269 | GVESLQQLLIFLDHMLVSGPHD |
| mL15-17 | 1270 | NVESLEHLMMWLERLLASGPYA |
| mL15-18 | 1271 | QVDSLQQLLIWLDHQLASGPKR |
| mL15-19 | 1272 | EVESLQQLLMWLEHKLAQGPQG |
| mL15-20 | 1273 | EVDSLQQLLMWLDQKLASGPHA |
| mL15-21 | 1274 | EVDSLQQLLMWLDQQLASGPQK |
| mL15-22 | 1275 | GVEQLPQLLMWLEQKLASGPQR |
| mL15-23 | 1276 | GEDSLQQLLMWLDQQLAAGPQV |
| mL15-24 | 1277 | ADDSLQQLLMWLDRKLASGPHV |
| mL15-25 | 1278 | PVDSLQQLLIWLDQKLASGPQG |
| L-17 | 1279 | RATLLKDFWQLVEGYGDN |
| mL17-con1 | 1280 | DWRATLLKEFWQLVEGLGDNLV |
| mL17-con2 | 1281 | QSRATLLKEFWQLVEGLGDKQA |
| mL17-1 | 1282 | DGRATLLTEFWQLVQGLGQKEA |
| mL17-2 | 1283 | LARATLLKEFWQLVEGLGEKVV |
| mL17-3 | 1284 | GSRDTLLKEFWQLVVGLGDMQT |
| mL17-4 | 1285 | DARATLLKEFWQLVDAYGDRMV |
| mL17-5 | 1286 | NDRAQLLRDFWQLVDGLGVKSW |
| mL17-6 | 1287 | GVRETLLYELWYLLKGLGANQG |
| mL17-7 | 1288 | QARATLLKEFCQLVGCQGDKLS |
| mL17-8 | 1289 | QERATLLKEFWQLVAGLGQNMR |
| mL17-9 | 1290 | SGRATLLKEFWQLVQGLGEYRW |
| mL17-10 | 1291 | TMRATLLKEFWLFVDGQREMQW |
| mL17-11 | 1292 | GERATLLNDFWQLVDGQGDNTG |
| mL17-12 | 1293 | DERETLLKEFWQLVHGWGDNVA |
| mL17-13 | 1294 | GGRATLLKELWQLLEGQGANLV |
| mL17-14 | 1295 | TARATLLNELVQLVKGYGDKLV |
| mL17-15 | 1295 | GMRATLLQEFWQLVGGQGDNWM |
| mL17-16 | 1297 | STRATLLNDLWQLMKGWAEDRG |
| mL17-17 | 1298 | SERATLLKELWQLVGGWGDNFG |
| mL17-18 | 1299 | VGRATLLKEFWQLVEGLVGQSR |
| mL17-19 | 1300 | EIRATLLKEFWQLVDEWREQPN |
| mE17-20 | 1301 | QLRATLLKEFLQLVHGLGETDS |
| mL17-21 | 1302 | TQRATLLKEFWQLIEGLGGKHV |
| mL17-22 | 1303 | HYRATLLKEFWQLVDGLREQGV |
| mL17-23 | 1304 | QSRVTLLREFWQLVESYRPIVN |
| mL17-24 | 1305 | LSRATLLNEFWQFVDGQRDKRM |
| mE17-25 | 1306 | WDRATLLNDFWHLMEELSQKPG |
| mL17-26 | 1307 | QERATLLKEFWRMVEGLGKNRG |
| mL17-27 | 1308 | NERATLLREFWQLVGGYGVNQR |
| L-20 | 1309 | YREMSMLEGLLDVLERLQHY |
| mL20-1 | 1310 | HQRDMSMLWELLDVLDGLRQYS |
| mL20-2 | 1311 | TQRDMSMLDGLLEVLDQLRQQR |
| mL20-3 | 1312 | TSRDMSLLWELLEELDRLGHQR |
| mL20-4 | 1313 | MQHDMSMLYGLVELLESLGHQI |
| mL20-5 | 1314 | WNRDMRMLESLFEVLDGLRQQV |
| mL20-6 | 1315 | GYRDMSMLEGLLAVLDRLGPQL |
| mL20 con1 | 1316 | TQRDMSMLEGLLEVLDRLGQQR |
| mL20 con2 | 1317 | WYRDMSMLEGLLEVLDRLGQQR |
| L-21 | 1318 | HNSSQMLLSELIMLVGSMMQ |
| mL21-1 | 1319 | TQNSRQMLLSDFMMLVGSMIQG |
| mL21-2 | 1320 | MQTSRHILLSEFMMLVGSIMHG |
| mL21-3 | 1321 | HDNSRQMLLSDLLHLVGTMIQG |
| mL21-4 | 1322 | MENSRQNLLRELIMLVGNMSHQ |
| mL21-5 | 1323 | QDTSRHMLLREFMMLVGEMIQG |
| mL21 con1 | 1324 | DQNSRQMLLSDLMILVGSMIQG |
| L-24 | 1325 | EFFHWLHNHRSEVNHWLDMN |
| mL24-1 | 1326 | NVFFQWVQKHGRVVYQWLDINV |
| mL24-2 | 1327 | FDFLQWLQNHRSEVEHWLVMDV |

TABLE 24
MYOSTATIN INHIBITOR PEPTIDES

| | |
|---|---|
| Peptibody Name | Peptide |

| | |
|---|---|
| 2x mTN8-Con6- | M-GAQ-WYPCYEGHFWCYDL- |
| (N)-1 K | GSGSATGGSGSTASSGSGSATG- |
| | WYPCYEGHFWCYDL-LE-5G-FC |
| | (SEQ ID NO: 1328) |
| 2x mTN8-Con6- | FC-5G-AQ-WYPCYEGHFWCYDL- |
| (C)-1 K | GSGSATGGSGSTASSGSGSATG- |
| | WYPCYEGHFWCYDL-LE |
| | (SEQ ID NO: 1329) |
| 2x mTN8-Con7- | M-GAQ-IFGCKWWDVQCYQF- |
| (N)-1 K | GSGSATGGSGSTASSGSGSATG- |
| | IFGCKWWDVQCYQF-LE-5G-FC |
| | (SEQ ID NO: 1330) |
| 2x mTN8-Con7- | FC-5G-AQ-IFGCKWWDVQCYQF- |
| (C)-1 K | GSGSATGGSGSTASSGSGSATG- |
| | IFGCKWWDVQCYQF-LE |
| | (SEQ ID NO: 1331) |
| 2x mTN8-Con8- | M-GAQ-IFGCKWWDVDCYQF |
| (N)-1 K | GSGSATGGSGSTASSGSGSATG- |
| | IFGCKWWDVDCYQF-LE-5G-FC |
| | (SEQ ID NO: 1332) |
| 2x mTN8-Con8- | FC-5G-AQ-IFGCKWWDVDCYQF- |
| (C)-1 K | GSGSATGGSGSTASSGSGSATG- |
| | IFGCKWWDVDCYQF-LE |
| | (SEQ ID NO: 1333) |
| 2X mTN8-19-7 | FC-5G-AQ-LADHGQCIRWPWMCPPEGWELEGSGSA |
| | TGGSGSTASSGSGSATGLADHGQCIRWPWMCPPEGW |
| | E-LE |
| | (SEQ ID NO: 1334) |
| 2X mTN8-19-7 | FC-5G-AQ-LADHGQCIRWPWMCPPEGWEGSGSATG |
| ST-GG del2x | GSGGGASSGSGSATGLADHGQCIRWPWMCPPEGWE |
| LE | (SEQ ID NO: 1335) |
| 2X mTN8-19-21 | FC-5G-AQ-SEYQGLCTRWPWMCPPQGWKLEGSGSA |
| | TGGSGSTASSGSGSATGSEYQGLCTRWPWMCPPQGW |
| | K-LE |
| | (SEQ ID NO: 1336) |
| 2X mTN8-19-21 | FC-5G-AQ-SEYQGLCTRWPWMCPPQGWKGSGSATG |
| ST-GG del2x | GSGGGASSGSGSATGSEYQGLCTRWPWMCPPQGWK |
| LE | |
| | (SEQ ID NO: 1337) |
| 2X mTN8-19-22 | FC-5G-AQ-TFSQGHCTRWPWMCPPQGWGLEGSGSA |
| | TGGSGSTASSGSGSATGTFSQGHCTRWPWMCPPQGW |
| | G-LE |
| | (SEQ ID NO: 1338) |
| 2X mTN8-19-32 | FC-5G-AQ-VADHGHCTRWPWMCPPQGWGLEGSGSA |
| | TGGSGSTASSGSGSATGVADHGHCTRWPWMCPPQGW |
| | G-LE |
| | (SEQ ID NO: 1339) |
| 2X mTN8-19-32 | FC-5G-AQ-VADHGHCTRWPWMCPPQGWGGSGSATG |
| ST-GG del2x | GSGGGASSGSGSATGVADHGHCTRWPWVCPPQGWG |
| LE | (SEQ ID NO: 1340) |
| 2X mTN8-19-33 | FC-5G-AQ-PESQGHCTRWIPWMCPPQGWGLEGSGS |
| | ATGGSGSTASSGSGSATGPESQGHCTRWPWMCPPQG |
| | WGLE |
| | (SEQ ID NO: 1341) |
| 2X mTN8-19-33 | FC-5G-AQ-PESQGHCTRWPWMCPPQGWGGSGSATG |
| ST-GG del2x | GSGGGASSGSGSATGPESQGHCTRWPWMCP PQGWG |
| LE | (SEQ ID NO: 1342) |

TABLE 25
Integrin-antagonist peptide sequences

| | SEQ. |
|---|---|
| | ID |
| Sequence/structure | NO: |
| CLCRGDCIC | 1344 |
| CWDDGWLC | 1345 |
| CWDDLWWLC | 1346 |
| CWDDGLMC | 1347 |
| CWDDGWMC | 1348 |
| CSWDDGWLC | 1349 |
| CPDDLWWLC | 1350 |
| NGR | 1351 |
| GSL | 1352 |
| RGD | 1353 |
| CGRECPRLCQSSC | 1354 |
| CNGRCVSGCAGRC | 1355 |
| CLSGSLSC | 1356 |
| GSL | 1357 |
| NGRAHA | 1358 |
| CNGRC | 1359 |
| CDCRGDCFC | 1360 |
| CGSLVRC | 1361 |
| DLXXL | 1362 |
| RTDLDSLRTYTL | 1363 |
| RTDLDSLRTY | 1364 |
| RTDLDSLRT | 1365 |
| RTDLDSLR | 1366 |
| GDLDLLKLRLTL | 1367 |
| GDLHSLRQLLSR | 1368 |
| RDDLHMLRLQLW | 1369 |
| SSDLHALKKRYG | 1370 |
| RGDLKQLSELTW | 1371 |
| CXXRGDC | 1372 |
| STGGFDDVYDWARGVSSALTTTLVATR | 1373 |
| STGGFDDVYDWARRVSSALTTTLVATR | 1374 |
| SRGVNFSEWLYDMSAAMKEASNVFPSRRSR | 1375 |
| SSQNWDMEAGVEDLTAAMLGLLSTIHSSSR | 1376 |
| SSPSLYTQFLVNYESAATRIQDLLIASRPSR | 1377 |
| SSTGWVDLLGALQRAADATRTSIPPSLQNSR | 1378 |
| DVYTKKELIECARRVSEK | 1379 |
| RGDGX | 1380 |
| CRGDGXC | 1381 |
| CARRLDAPC | 1382 |
| CPSRLDSPC | 1383 |
| CDCRGDCFC | 1384 |
| CDCRGDCLC | 1385 |
| RGDLAALSAPPV | 1386 |

TABLE 26
Selectin antagonist peptide sequences

| | SEQ. |
|---|---|
| | ID |
| Sequence/structure | NO: |
| DITWDQLWDLMK | 1387 |
| DITWDELWKIMN | 1388 |
| DYTWFELWDMMQ | 1389 |
| QITWAQLWNMMK | 1390 |
| DMTWHDLWTLMS | 1391 |
| DYSWHDLWEMMS | 1392 |
| EITWDQLWEVMN | 1393 |
| HVSWEQLWDIMN | 1394 |
| HITWDQLWRIMT | 1395 |
| RNMSWLELWEHMK | 1396 |
| AEWTWDQLWHVMNPAESQ | 1397 |
| HRAEWLALWEQMSP | 1398 |
| KKEDWLALWRIMSV | 1399 |
| ITWDQLWDLMK | 1400 |
| DITWDQLWDLMK | 1401 |
| DITWDQLWDLMK | 1402 |
| DITWDQLWDLMK | 1403 |
| CQNRYTDLVAIQNKNE | 1404 |
| AENWADNEPNNKRNNED | 1405 |
| RKNNKTWTWVGTKKALTNE | 1406 |
| KKALTNEAENWAD | 1407 |
| CQXRYTDLVAIQNKXE | 1408 |
| AENWADGEPNNKXNXED | 1409 |

TABLE 27
Vinculin binding peptides

| | SEQ. |
|---|---|
| | ID |
| Sequence/structure | NO: |
| SSQNWDMEAGVEDLTAAMLGLLSTIHSSSR | 1410 |
| SSPSLYTQFLVNYESAATRIQDLLLASRPSR | 1411 |
| SSTGWVDLLGALQRAADATRTSIPPSLQNSR | 1412 |
| DVYTKKELIECARRVSEK | 1413 |
| STGGFDDVYDWARGVSSALTTTLVATR | 1414 |
| STGGFDDVYDWARRVSSALTTTLVATR | 1415 |
| SRGVNFSEWLYDMSAAMKEASNVFPSRRSR | 1416 |

TABLE 28
Laminin-related peptide sequences

| | SEQ. |
|---|---|
| | ID |
| Sequence/structure | NO: |
| YIGSRYIGSR [i.e., (YIGSR)₂] | 1417 |
| YLGSRYIGSRYIGSR [i.e., (YIGSR)₃] | 1418 |
| YIGSRYIGSRYIGSRYIGSR [i.e., (YIGSR)₄] | 1419 |
| YIGSRYIGSRYIGSRYIGSRYIGSR [i.e., (YIGSR)₅] | 1420 |
| IPCNNKGAHSVGLMWWMLAR | 1421 |
| YIGSRREDVEILDVPDSGR | 1422 |
| RGDRGDYIGSRRGD | 1423 |
| YIGSRYIGSRYIGSRYIGSRYIGSR | 1424 |
| REDVEILDVYIGSRPDSGR | 1425 |
| YIGSRREDVEILDVPDSGR | 1426 |

TABLE 29
NGF Modulating Peptides

| SEQ | |
|---|---|
| ID | Sequence of Peptide Portion of |
| NO: | Fc-Peptide Fusion Product |
| 1427 | TGYTEYTEEWPMGFGYQWSF |
| 1428 | TDWLSDFPFYEQYFGLMPPG |
| 1429 | FMRFPNPWKLVEPPQGWYYG |
| 1430 | VVKAPHFEFLAPPHFHEFPF |
| 1431 | FSYIWIDETPSNIDRYMLWL |
| 1432 | VNFPKVPEDVEPWPWSLKLY |
| 1433 | TWHPKTYEEFALPFFVPEAP |
| 1434 | WHFGTPYIQQQPGVYWLQAP |
| 1435 | VWNYGPFFMNFPDSTYFLHE |
| 1436 | WRIHSKPLDYSHVWFFPADF |
| 1437 | FWDGNQPPDILVDWPWNPPV |
| 1438 | FYSLEWLKDHSEFFQTVTEW |
| 1439 | QFMELLKFFNSPGDSSHHFL |
| 1440 | TNVDWISNNWEHMKSFFTED |
| 1441 | PNEKPYQMQSWFPPDWPVPY |
| 1442 | WSHTEWVPQVWWKPPNHFYV |
| 1443 | WGEWINDAQVHMHEGFISES |
| 1444 | VPWEHDHDLWEIISQDWHIA |
| 1445 | VLHLQDPRGWSNFPPGVLEL |
| 1446 | IHGCWFTEEGCVWQ |
| 1447 | YMQCQFARDGCPQW |
| 1448 | KLQCQYSESGCPTI |
| 1449 | FLQCEISGGACPAP |
| 1450 | KLQCEFSTSGCPDL |
| 1451 | KLQCEFSTQGCPDL |
| 1452 | KLQCEFSTSGCPWL |
| 1453 | IQGCWFTEEGCPWQ |
| 1454 | SFDCDNPWGHVLQSCFGF |
| 1455 | SFDCDNPWGHKLQSCFGF |

TABLE 30
TALL MODULATING PEPTIDES

| | SEQ |
|---|---|
| | ID |
| Sequence/structure | NO: |
| LPGCKWDLLIKQWVCDPL-Λ-V1 | 1456 |
| V1-Λ-LPGCKWDLLIKQWVCDPL | 1457 |
| LPGCKWDLLIKQWVCDPL-Λ- | 1458 |
| LPGCKWDLLIKQWVCDPL-Λ-V1 | |
| V1-Λ-LPGCKWDLLIKQWVCDPL-Λ- | 1459 |
| LPGCKWDLLLKQWVCDPL | |
| SADCYFDILTKSDVCTSS-Λ-V1 | 1460 |
| V1-Λ-SADCYFDILTKSDVCTSS | 1461 |
| SADCYFDILTKSDVTSS-Λ- | 1462 |
| SADCYFDILTKSDVTSS-Λ-V1 | |
| V1-A-SADCYFDILTKSDVTSS-Λ- | 1463 |
| SADCYFDILTKSDVTSS | |
| FHDCKWDLLTKQWVCHGL-Λ-V1 | 1464 |
| V1-Λ-FHDCKWDLLTKQWVCHGL | 1465 |
| FHDCKWDLLTKQWVCHGL-Λ- | 1466 |
| FHDCKWDLLTKQWVCHGL-Λ-V1 | |
| V1-Λ-FHDCKWDLLTKQWVCHGL-Λ- | 1467 |
| FHDCKWDLLTKQWVCHGL | |

TABLE 31
TALL-1 inhibitory peptibodies.

| | Pepti- | |
|---|---|---|
| | body | |
| | SEQ | |
| | ID | |
| Peptibody | NO | Peptide Sequence |
| TALL-1-8-1 | 1468 | MPGTCFPFPW ECTHAGGGGG VDKTHTCPPC |
| 1-a | | PAPELLGGPS VFLFPPKPKD TLMISRTPEV |
| | | TCVVVDVSHE DPEVKFNWYV DGVEVHNAKT |
| | | KPREEQYNST YRVVSVLTVL HQDWLNGKEY |
| | | KCKVSNKALP APIEKTISKA KGQPREPQVY |
| | | TLPPSRDELT KNQVSLTCLV KGFYPSDIAV |
| | | EWESNGQPEN NYKTTPPVLD SDGSFFLYSK |
| | | LTVDKSRWQQ GNVFSCSVMH EALHNHYTQK |
| | | SLSLSPGK |
| TALL-1-8- | 1469 | MWGACWPFPW ECFKEGGGGG VDKTHTCPPC |
| 2-a | | PAPELLGGPS VFLFPPKPKD TLMISRTPEV |
| | | TCVVVDVSHE DPEVKFNWYV DGVEVHNAKT |
| | | KPREEQYNST YRVVSVLTVL HQDWLNGKEY |
| | | KCKVSNKALP APIEKTISKA KGQPREPQVY |
| | | TLPPSRDELT KNQVSLTCLV KGFYPSDIAV |
| | | EWESNGQPEN NYKTTPPVLD SDGSFFLYSK |
| | | LTVDKSRWQQ GNVFSCSVMH EALHNHYTQK |
| | | SLSLSPGK |
| TALL-1-8- | 1470 | MVPFCDLLTK HCFEAGGGGG VDKTHTCPPC |
| 4-a | | PAPELLGGPS VFLFPPKPKD TLMISRTPEV |
| | | TCVVVDVSHE DPEVKFNWYV DGVEVHNAKT |
| | | KPREEQYNST YRVVSVLTVL HQDWLNGKEY |
| | | KCKVSNKALP APIEKTISKA KGQPREPQVY |
| | | TLPPSRDELT KNQVSLTCLV KGFYPSDIAV |
| | | EWESNGQPEN NYKTTPPVLD SDGSFFLYSK |
| | | LTVDKSRWQQ GNVFSCSVMH EALHNHYTQK |
| | | SLSLSPGK |
| TALL-1-12- | 1471 | MGSRCKYKWD VLTKQCFHHG GGGGVDKTHT |
| 4-a | | CPPCPAPELL GGPSVFLFPP KPKDTLMISR |
| | | TPEVTCVVVD VSHEDPEVKF NWYVDGVEVH |
| | | NAKTKPREEQ YNSTYRVVSV LTVLHQDWLN |
| | | GKEYKCKVSN KALPAPIEKT ISKAKGQPRE |
| | | PQVYTLPPSR DELTKNQVSL TCLVKGFYPS |
| | | DIAVEWESNG QPENNYKTTP PVLDSDGSFF |
| | | LYSKLTVDKS RWQQGNVFSC SVMHEALHNH |
| | | YTQKSLSLSP GK |
| TALL-1-12- | 1472 | MLPGCKWDLL IKQWVCDPLG GGGGVDKTHT |
| 3-a | | CPPCPAPELL GGPSVFLFPP KPKDTLMISR |
| | | TPEVTCVVVD VSHEDPEVKF NWYVDGVEVH |
| | | NAKTKPREEQ YNSTYRVVSV LTVLHQDWLN |
| | | GKEYKCKVSN KALPAPIEKT ISKAKGQPRE |
| | | PQVYTLPPSR DELTKNQVSL TCLVKGFYPS |
| | | DIAVEWESNG QPENNYKTTP PVLDSDGSFF |
| | | LYSKLTVDKS RWQQGNVFSC SVMHEALHNH |
| | | YTQKSLSLSP GK |
| TALL-1-12- | 1473 | MSADCYFDIL TKSDVCTSSG GGGG |
| 5-a | | VDKTHT CPPCPAPELL GGPSVFLFPP |
| | | KPKDTLMISR TPEVTCVVVD VSHEDPEVKF |
| | | NWYVDGVEVH NAKTKPREEQ YNSTYRVVSV |
| | | LTVLHQDWLN GKEYKCKVSN KALPAPIEKT |
| | | ISKAKGQPRE PQVYTLPPSR DELTKNQVSL |
| | | TCLVKGFYPS DIAVEWESNG QPENNYKTTP |
| | | PVLDSDGSFF LYSKLTVDKS RWQQGNVFSC |
| | | SVMHEALHNH YTQKSLSLSP GK |
| TALL-1-12- | 1474 | MSDDCMYDQL TRMFICSNLG GGGGVDKTHT |
| 8-a | | CPPCPAPELL GGPSVFLFPP KPKDTLMISR |
| | | TPEVTCVVVD VSHEDPEVKF NWYVDGVEVH |
| | | NAKTKPREEQ YNSTYRVVSV LTVLHQDWLN |
| | | GKEYKCKVSN KALPAPIEKT ISKAKGQPRE |
| | | PQVYTLPPSR DELTKNQVSL TCLVKGFYPS |
| | | DIAVEWESNG QPENNYKTTP PVLDSDGSFF |
| | | LYSKLTVDKS RWQQGNVFSC SVMHEALHNH |
| | | YTQKSLSLSP GK |
| TALL-1-12- | 1475 | MDLNCKYDEL TYKEWCQFNG GGGGVDKTHT |
| 9-a | | CPPCPAPELL GGPSVFLFPP KPKDTLMISR |
| | | TPEVTCVVVD VSHEDPEVKF NWYVDGVEVH |
| | | NAKTKPREEQ YNSTYRVVSV LTVLHQDWLN |
| | | GKEYKCKVSN KALPAPIEKT ISKAKGQPRE |
| | | PQVYTLPPSR DELTKNQVSL TCLVKGFYPS |
| | | DIAVEWESNG QPENNYKTTP PVLDSDGSFF |
| | | LYSKLTVDKS RWQQGNVFSC SVMHEALHNH |
| | | YTQKSLSLSP GK |
| TALL-1-12- | 1476 | MFHDCKYDLL TRQMVCHGLG GGGGVDKTHT |
| 10-a | | CPPCPAPELL GGPSVFLFPP KPKDTLMISR |
| | | TPEVTCVVVD VSHEDPEVKF NWYVDGVEVH |
| | | NAKTKPREEQ YNSTYRVVSV LTVLHQDWLN |
| | | GKEYKCKVSN KALPAPIEKT ISKAKGQPRE |
| | | PQVYTLPPSR DELTKNQVSL TCLVKGFYPS |
| | | DIAVEWESNG QPENNYKTTP PVLDSDGSFF |
| | | LYSKLTVDKS RWQQGNVFSC SVMHEALHNH |
| | | YTQKSLSLSP GK |
| TALL-1-12- | 1477 | MRNHCFWDHL LKQDICPSPG GGGGVDKTHT |
| 11-a | | CPPCPAPELL GGPSVFLFPP KPKDTLMISR |
| | | TPEVTCVVVD VSHEDPEVKF NWYVDGVEVH |
| | | NAKTKPREEQ YNSTYRVVSV LTVLHQDWLN |
| | | GKEYKCKVSN KALPAPIEKT ISKAKGQPRE |
| | | PQVYTLPPSR DELTKNQVSL TCLVKGFYPS |
| | | DIAVEWESNG QPENNYKTTP PVLDSDGSFF |
| | | LYSKLTVDKS RWQQGNVFSC SVMHEALHNH |
| | | YTQKSLSLSP GK |
| TALL-1-12- | 1478 | MANQCWWDSL TKKNVCEFFG GGGGVDKTHT |
| 14-a | | CPPCPAPELL GGPSVFLFPP KPKDTLMISR |
| | | TPEVTCVVVD VSHEDPEVKF NWYVDGVEVH |
| | | NAKTKPREEQ YNSTYRVVSV LTVLHQDWLN |
| | | GKEYKCKVSN KALPAPIEKT ISKAKGQPRE |
| | | PQVYTLPPSR DELTKNQVSL TCLVKGFYPS |
| | | DIAVEWESNG QPENNYKTTP PVLDSDGSFF |
| | | LYSKLTVDKS RWQQGNVFSC SVMHEALHNH |
| | | YTQKSLSLSP GK |
| TALL-1- | 1479 | MFHDCKWDLL TKQWVCHGLG GGGGVDKTHT |
| consensus | | CPPCPAPELL GGPSVFLFPP KPKDTLMISR |
| | | TPEVTCVVVD VSHEDPEVKF NWYVDGVEVH |
| | | NAKTKPREEQ YNSTYRVVSV LTVLHQDWLN |
| | | GKEYKCKVSN KALPAPIEKT ISKAKGQPRE |
| | | PQVYTLPPSR DELTKNQVSL TCLVKGFYPS |
| | | DIAVEWESNG QPENNYKTTP PVLDSDGSFF |
| | | LYSKLTVDKS RWQQGNVFSC SVMHEALHNH |
| | | YTQKSLSLSP GK |
| TALL-1 12-3 | 1480 | MLPGCKWDLL IKQWVCDPLG SGSATGGSGS |
| tandem | | TASSGSGSAT HMLPGCKWDL LIKQWVCDPL |
| dimer | | GGGGGVDKTH TCPPCPAPEL LGGPSVFLFP |
| | | PKPKDTLMIS RTPEVTCVVV DVSHEDPEVK |
| | | FNWYVDGVEV HNAKTKPREE QYNSTYRVYS |
| | | VLTVLHQDWL NGKEYKCKVS NKALPAPIEK |
| | | TISKAKGQPR EPQVYTLPPS RDELTKNQVS |
| | | LTCLVKGFYP SDIAVEWESN GQPENNYKTT |
| | | PPVLDSDGSF FLYSKLTVDK SRWQQGNVFS |
| | | CSVMHEALHN HYTQKSLSLS PGK |
| TALL-1 | 1481 | MFHDCKWDLL TKQWVCHGLG SGSATGGSGS |
| consensus | | TASSGSGSAT HMFHDCKWDL LTKQWVCHGL |
| tandem | | GGGGGVDKTH TCPPCPAPEL LGGPSVFLFP |
| dimer | | PKPKDTLMIS RTPEVTCVVV DVSHEDPEVK |
| | | FNWYVDGVEV HNAKTKPREE QYNSTYRVVS |
| | | VLTVLHQDWL NGKEYKCKVS NKALPAPIEK |
| | | TISKAKGQPR EPQVYTLPPS RDELTKNQVS |
| | | LTCLVKGFYP SDIAVEWESN GQPENNYKTT |
| | | PPVLDSDGSF FLYSKLTVDK SRWQQGNVFS |
| | | CSVMHEALHN HYTQKSLSLS PGK |

TABLE 32
ANG-2 INHIBITOR PEPTIDES

| | | |
|---|---|---|
| PEPTIDE | SEQ ID NO. | PEPTIDE SEQUENCE |

| | | |
|---|---|---|
| Con4-44 | 1482 | PIRQEECDWDPWTCEHMWEV |
| Con4-40 | 1483 | TNIQEECEWDPWTCDHMPGK |
| Con4-4 | 1484 | WYEQDACEWDPWTCEHMAEV |
| Con4-31 | 1485 | NRLQEVCEWDPWTCEHMENV |
| Con4-C5 | 1486 | AATQEECEWDPWTCEHMIRS |
| Con4-42 | 1487 | LRHQEGCEWDPWTCEHMFDW |
| Con4-35 | 1488 | VPRQKDCEWDPWTCEHMYVG |
| Con4-43 | 1489 | SISHEECEWDPWTCEHMQVG |
| Con4-49 | 1490 | WAAQEECEWDPWTCEHMGRM |
| Con4-27 | 1491 | TWPQDKCEWDPWTCEHMGST |
| Con4-48 | 1492 | GHSQEECGWDPWTCEHMGTS |
| Con4-46 | 1493 | QHWQEECEWDPWTCDHMPSK |
| Con4-41 | 1494 | NVRQEKCEWDPWTCEHMPVR |
| Con4-36 | 1495 | KSGQVECNWDPWTCEHMPRN |
| Con4-34 | 1496 | VKTQEHCDWDPWTCEHMREW |
| Con4-28 | 1497 | AWGQEGCDWDPWTCEHMLPM |
| Con4-39 | 1498 | PVNQEDCEWDPWTCEHMPPM |
| Con4-25 | 1499 | RAPQEDCEWDPWTCAHMDIK |
| Con4-50 | 1500 | HGQNMECEWDPWTCEHMFRY |
| Con4-38 | 1501 | PRLQEECVWDPWTCEHMPLR |
| Con4-29 | 1502 | RTTQEKCEWDPWTCEHMESQ |
| Con4-47 | 1503 | QTSQEDCVWDPWTCDHMVSS |
| Con4-20 | 1504 | QVIGRPCEWDPWTCEHLEGL |
| Con4-45 | 1505 | WAQQEECAWDPWTCDHMVGL |
| Con4-37 | 1506 | LPGQEDCEWDPWTCEHMVRS |
| Con4-33 | 1507 | PMNQVECDWDPWTCEHMPRS |
| AC2-Con4 | 1508 | FGWSHGCEWDPWTCEHMGST |
| Con4-32 | 1509 | KSTQDDCDWDPWTCEHMVGP |
| Con4-17 | 1510 | GPRISTCQWDPWTCEHMDQL |
| Con4-8 | 1511 | STIGDMCEWDPWTCAHMQVD |
| AC4-Con4 | 1512 | VLGGQGCEWDPWTCRLLQGW |
| Con4-1 | 1513 | VLGGQGCQWDPWTCSHLEDG |
| Con4-C1 | 1514 | TTIGSMCEWDPWTCAHMQGG |
| Con4-21 | 1515 | TKGKSVCQWDPWTCSHMQSG |
| Con4-C2 | 1516 | TTIGSMCQWDPWTCAHMQGG |
| Con4-18 | 1517 | WVNEVVCEWDPWTCNHWDTP |
| Con4-19 | 1518 | VVQVGMCQWDPWTCKHMRLQ |
| Con4-16 | 1519 | AVGSQTCEWDPWTCAHLVEV |
| Con4-11 | 1520 | QGMKMFCEWDPWTCAHIVYR |
| Con4-C4 | 1521 | TTIGSMCQWDPWTCEHMQGG |
| Con4-23 | 1522 | TSQRVGCEWDPWTCQHLTYT |
| Con4-15 | 1523 | QWSWPPCEWDPWTCQTVWPS |
| Con4-9 | 1524 | GTSPSFCQWDPWTCSHMVQG |
| TN8-Con4* | 1525 | QEECEWDPWTCEHM |

TABLE 33
ANG-2 INHIBITOR PEPTIDES

| | | |
|---|---|---|
| Peptide | SEQ ID NO. | Peptide Sequence |

| | | |
|---|---|---|
| L1-1 | 1526 | QNYKPLDELDATLYEHFIFHYT |
| L1-2 | 1527 | LNFTPLDELEQTLYEQWTLQQS |
| L1-3 | 1528 | TKFNPLDELEQTLYEQWTLQHQ |
| L1-4 | 1529 | VKFKPLDALEQTLYEHWMFQQA |
| L1-5 | 1530 | VKYKPLDELDEILYEQQTFQER |
| L1-7 | 1531 | TNFMPMDDLEQRLYEQFILQQG |
| L1-9 | 1532 | SKFKPLDELEQTLYEQWTLQHA |
| L1-10 | 1533 | QKFQPLDELEQTLYEQFMLQQA |
| L1-11 | 1534 | QNFKPMDELEDTLYKQFLFQHS |
| L1-12 | 1535 | YKFTPLDDLEQTLYEQWTLQHV |
| L1-13 | 1536 | QEYEPLDELDETLYNQWMFHQR |
| L1-14 | 1537 | SNFMPLDELEQTLYEQFMLQHQ |
| L1-15 | 1538 | QKYQPLDELDKTLYDQFMLQQG |
| L1-16 | 1539 | QKFQPLDELEETLYKQWTLQQR |
| L1-17 | 1540 | VKYKPLDELDEWLYHQFTLHHQ |
| L1-18 | 1541 | QKFMPLDELDEILYEQFMFQQS |
| L1-19 | 1542 | QTFQPLDDLEEYLYEQWIRRYH |
| L1-20 | 1543 | EDYMPLDALDAQLYEQFILLHG |
| L1-21 | 1544 | HTFQPLDELEETLYYQWLYDQL |
| L1-22 | 1545 | YKFNPMDELEQTLYEEFLFQHA |
| AC6-L1 | 1546 | TNYKPLDELDATLYEHWILQHS |
| L1-C1 | 1547 | QKFKPLDELEQTLYEQWTLQQR |
| L1-C2 | 1548 | TKFQPLDELDQTLYEQWTLQQR |
| L1-C3 | 1549 | TNFQPLDELDQTLYEQWTLQQR |
| L1 | 1550 | KFNPLDELEETLYEQFTFQQ |

TABLE 34
ANG-2 INHIBITOR PEPTIDES

| | | |
|---|---|---|
| Peptide | SEQ ID NO. | Sequence |

| | | |
|---|---|---|
| Con1-1 | 1551 | AGGMRPYDGMLGWPNYDVQA |
| Con1-2 | 1552 | QTWDDPCMHILGPVTWRRCI |
| Con1-3 | 1553 | APGQRPYDGMLGWPTYQRIV |
| Con1-4 | 1554 | SGQLRPCEEIFGCGTQNLAL |
| Con1-5 | 1555 | FGDKRPLECMFGGPIQLCPR |
| Con1-6 | 1556 | GQDLRPCEDMFGCGTKDWYG |
| Con1 | 1557 | KRPCEEIFGGCTYQ |

TABLE 35
ANG-2 INHIBITOR PEPTIDES

| | | |
|---|---|---|
| Peptide | SEQ ID NO: | Sequence |

| | | |
|---|---|---|
| 12-9-1 | 1558 | GFEYCDGMEDPFTFGCDKQT |
| 12-9-2 | 1559 | KLEYCDGMEDPFTQGCDNQS |
| 12-9-3 | 1560 | LQEWCEGVEDPFTFGCEKQR |
| 12-9-4 | 1561 | AQDYCEGMEDPFTFGCEMQK |
| 12-9-5 | 1562 | LLDYCEGVQDPFTFGCENLD |
| 12-9-6 | 1563 | HQEYCEGMEDPFTFGCEYQG |
| 12-9-7 | 1564 | MLDYCEGMDDPFTFGCDKQM |
| 12-9-C2 | 1565 | LQDYCEGVEDPFTFGCENQR |
| 12-9-C1 | 1566 | LQDYCEGVEDPFTFGCEKQR |
| 12-9 | 1567 | FDYCEGVEDPFTFGCDNH |

TABLE 36
Ang-2 Binding Peptides

| | | |
|---|---|---|
| Peptide | Seq Id No. | Sequence |

| | | |
|---|---|---|
| TN8-8 | 1568 | KRPCEEMWGGCNYD |
| TN8-14 | 1569 | HQICKWDPWTCKHW |
| TN8-Con1 | 1570 | KRPCEEIFGGCTYQ |
| TN8-Con4 | 1571 | QEECEWDPWTCEHM |
| TN12-9 | 1572 | FDYCEGVEDPFTFGCDNH |
| L1 | 1573 | KFNPLDELEETLYEQFTFQQ |
| C17 | 1574 | QYGCDGFLYGCMIN |

TABLE 37
Ang-2 Binding Peptides

| | |
|---|---|
| Peptibody | Peptibody Sequence |

| | |
|---|---|
| L1 (N) | MGAQKFNPLDELEETLYEQFTFQQLEGGGGG-Fc |
| | (SEQ ID NO: 1575) |
| L1 (N) WT | MKFNPLDELEETLYEQFTFQQLEGGGGG-Fc |
| | (SEQ ID NO: 1576) |
| L1 (N) 1K WT | MKFNPLDELEETLYEQFTFQQGSGSATGGSGSTASS |
| | GSGSATHLEGGGGG-Fc |
| | (SEQ ID NO: 1577) |
| 2xL1 (N) | MGAQKFNPLDELEETLYEQFTFQQGGGGGGGGKFNP |
| | LDELEETLYEQFTFQQLEGGGGG-Fc |
| | (SEQ ID NO: 1578) |
| 2xL1 (N) WT | MKFNPLDELEETLYEQFTFQQGGGGGGGKFNPLDEL |
| | EETLYEQFTFQQLEGGGGG-Fc |
| | (SEQ ID NO: 1579) |
| Con4 (N) | MGAQQEECEWDPWTCEHMLEGGGGG-Fc |
| | (SEQ ID NO: 1580) |
| Con4 (N) 1K-WT | MQEEGEWDPWTCEHMGSGSATGGSGSTASSGSGSAT |
| | HLEGGGGG-Fc |
| | (SEQ ID NO: 1581) |
| 2xCon4 (N) 1K | MGAQQEECEWDPWTCEHMGSGSATGGSGSTASSGSG |
| | SATHQEECEWDPWTCEHMLEGGGGG-Fc |
| | (SEQ ID NO: 1582) |
| L1 (C) | M-Fc-GGGGGAQKFNPLDELEETLYEQFTFQQLE |
| | (SEQ ID NO: 1583) |
| L1 (C) 1K | M-Fc-GGGGGAQGSGSATGGSGSTASSGSGSATHKF |
| | NPLDELEETLYEQFTFQQLE |
| | (SEQ ID NO: 1584) |
| 2xL1 (C) | M-Fc-GGGGGAQKFNPLDELEETLYEQFTFQQGGGG |
| | GGGGKFNPLDELEETLYEQFTFQQLE |
| | (SEQ ID NO: 1585) |
| Con4 (C) | M-Fc-GGGGGAQQEECEWDPWTCEHMLE |
| | (SEQ ID NO: 1586) |
| Con4 (C) 1K | M-Fc-GGGGGAQGSGSATGGSGSTASSGSGSATHQE |
| | ECEWDPWTCEHMLE |
| | (SEQ ID NO: 1587) |
| 2xCon4 (C) 1K | M-Fc-GGGGGAQQEECEWDPWTCEHMGSGSATGGSG |
| | STASSGSGSATHQEECEWDPWTCEHMLE |
| | (SEQ ID NO: 1588) |
| Con4-L1 (N) | MGAQEECEWDPWTCEHMGGGGGGGGKFNPLDELEET |
| | LYEQFTFQQGSGSATGGSGSTASSGSGSATHLEGGG |
| | GG-Fc |
| | (SEQ ID NO: 1589) |
| Con4-L1 (C) | M-Fc-GGGGGAQGSGSATGGSGSTASSGSGSATHKF |
| | NPLDELEETLYEQFTFQQGGGGGQEECEWDPWTCEH |
| | MLE |
| | (SEQ ID NO: 1590) |
| TN-12-9 (N) | MGAQ-FDYCEGVEDPFTFGCDNHLE-GGGGG-Fc |
| | (SEQ ID NO: 1591) |
| C17 (N) | MGAQ-QYGCDGFLYGCMINLE-GGGGG-Fc |
| | (SEQ ID NO: 1592) |
| TN8-8 (N) | MGAQ-KRPCEEMWGGCNYDLEGGGGG-Fc |
| | (SEQ ID NO: 1593) |
| TN8-14 (N) | MGAQ-HQICKWDPWTCKHWLEGGGGG-Fc |
| | (SEQ ID NO: 1594) |
| Con1 (N) | MGAQ-KRPCEEIFGGCTYQLEGGGGG-Fc |
| | (SEQ ID NO: 1595) |

TABLE 38
Ang-2 Binding Peptides

| Con4 | |
|---|---|
| Derived | |
| Affinity- | |
| Matured | |
| Pbs | Peptibody Sequence (Seq Id No:) |
| Con4-44 | M-Fc-GGGGGAQ-PIRQEECDWDPWTCEHMWEV-LE |
| (C) | (SEQ ID NO: 1596) |
| Con4-40 | M-Fc-GGGGGAQ-TNIQEECEWDPWTCDHMPGK-LE |
| (C) | (SEQ ID NO: 1597) |
| Con4-4 | M-Fc-GGGGGAQ-WYEQDACEWDPWTCEHMAEV-LE |
| (C) | (SEQ ID NO: 1598) |
| Con4-31 | M-Fc-GGGGGAQ-NRLQEVCEWDPWTCEHMENV-LE |
| (C) | (SEQ ID NO: 1599) |
| Con4-C5 | M-Fc-GGGGGAQ-AATQEECEWDPWTCEHMPRS-LE |
| (C) | (SEQ ID NO: 1600) |
| Con4-42 | M-Fc-GGGGGAQ-LRHQEGCEWDPWTCEHMFDW-LE |
| (C) | (SEQ ID NO: 1602) |
| Con4-35 | M-Fc-GGGGGAQ-VPRQKDCEWDPWTCEHMYVG-LE |
| (C) | (SEQ ID NO: 1602) |
| Con4-43 | M-Fc-GGGGGAQ-SISHEECEWDPWTCEHMQVG-LE |
| (C) | (SEQ ID NO: 1603) |
| Con4-49 | M-Fc-GGGGGAQ-WAAQEECEWDPWTCEHMGRM-LE |
| (C) | (SEQ ID NO: 1604) |
| Con4-27 | M-Fc-GGGGGAQ-TWPQDKCEWDPWTCEHMGST-LE |
| (C) | (SEQ ID NO: 1605) |
| Con4-48 | M-Fc-GGGGGAQ-GHSQEECGWDPWTCEHMGTS-LE |
| (C) | (SEQ ID NO: 1606) |
| Con4-46 | M-Fc-GGGGGAQ-QHWQEECEWDPWTCDHMPSK-LE |
| (C) | (SEQ ID NO: 1607) |
| Con4-41 | M-Fc-GGGGGAQ-NVRQEKCEWDPWTCEHMPVR-LE |
| (C) | (SEQ ID NO: 1608) |
| Con4-36 | M-Fc-GGGGGAQ-KSGQVECNWDPWTCEHMPRN-LE |
| (C) | (SEQ ID NO: 1609) |
| Con4-34 | M-Fc-GGGGGAQ-VKTQEHCDWDPWTCEHMREW-LE |
| (C) | (SEQ ID NO: 1610) |
| Con4-28 | M-Fc-GGGGGAQ-AWGQEGCDWDPWTCEHMLPM-LE |
| (C) | (SEQ ID NO: 1611) |
| Con4-39 | M-Fc-GGGGGAQ-PVNQEDCEWDPWTCEHMPPM-LE |
| (C) | (SEQ ID NO: 1612) |
| Con4-25 | M-Fc-GGGGGAQ-RAPQEDCEWDPWTCAHMDIK-LE |
| (C) | (SEQ ID NO: 1613) |
| Con4-50 | M-Fc-GGGGGAQ-HGQNMECEWDPWTCEHMFRY-LE |
| (C) | (SEQ ID NO: 1614) |
| Con4-38 | M-Fc-GGGGGAQ-PRLQEECVWDPWTCEHMPLR-LE |
| (C) | (SEQ ID NO: 1615) |
| Con4-29 | M-Fc-GGGGGAQ-RTTQEKCEWDPWTCEHMESQ-LE |
| (C) | (SEQ ID NO: 1616) |
| Con4-47 | M-Fc-GGGGGAQ-QTSQEDCVWDPWTCDHMVSS-LE |
| (C) | (SEQ ID NO: 1617) |
| Con4-20 | M-Fc-GGGGGAQ-QVIGRPCEWDPWTCEHLEGL-LE |
| (C) | (SEQ ID NO: 1618) |
| Con4-45 | M-Fc-GGGGGAQ-WAQQEECAWDPWTCDHMVGL-LE |
| (C) | (SEQ ID NO: 1619) |
| Con4-37 | M-Fc-GGGGGAQ-LPGQEDCEWDPWTCEHMVRS-LE |
| (C) | (SEQ ID NO: 1620) |
| Con4-33 | M-Fc-GGGGGAQ-PMNQVECDWDPWTCEHMPRS-LE |
| (C) | (SEQ ID NO: 1621) |
| AC2-Con4 | M-Fc-GGGGGAQ-FGWSHGCEWDPWTCEHMGST-LE |
| (C) | (SEQ ID NO: 1622) |
| Con4-32 | M-Fc-GGGGGAQ-KSTQDDCDWDPWTCEHMVGP-LE |
| (C) | (SEQ ID NO: 1623) |
| Con4-17 | M-Fc-GGGGGAQ-GPRISTCQWDPWTCEHMDQL-LE |
| (C) | (SEQ ID NO: 1624) |
| Con4-8 | M-Fc-GGGGGAQ-STIGDMCEWDPWTCAHMQVD-LE |
| (C) | (SEQ ID NO: 1625) |
| AC4-Con4 | M-Fc-GGGGGAQ-VLGGQGCEWDPWTCRLLQGW-LE |
| (C) | (SEQ ID NO: 1626) |
| Con4-1 | M-Fc-GGGGGAQ-VLGGQGCQWDPWTCSHLEDG-LE |
| (C) | (SEQ ID NO: 1627) |
| Con4-C1 | M-Fc-GGGGGAQ-TTIGSMCEWDPWTCAHMQGG-LE |
| (C) | (SEQ ID NO: 1628) |
| Con4-21 | M-Fc-GGGGGAQ-TKGKSVCQWDPWTCSHMQSG-LE |
| (C) | (SEQ ID NO: 1629) |
| Con4-C2 | M-Fc-GGGGGAQ-TTIGSMCQWDPWTCAHMQGG-LE |
| (C) | (SEQ ID NO: 1630) |
| Con4-18 | M-Fc-GGGGGAQ-WVNEVVCEWDPWTCNHWDTP-LE |
| (C) | (SEQ ID NO: 1631) |
| Con4-19 | M-Fc-GGGGGAQ-VVQVGMCQWDPWTCKHMRLQ-LE |
| (C) | (SEQ ID NO: 1632) |
| Con4-16 | M-Fc-GGGGGAQ-AVGSQTCEWDPWTCAHLVEV-LE |
| (C) | (SEQ ID NO: 1633) |
| Con4-11 | M-Fc-GGGGGAQ-QGMKMFCEWDPWTCAHIVYR-LE |
| (C) | (SEQ ID NO: 1634) |
| Con4-C4 | M-Fc-GGGGGAQ-TTIGSMCQWDPWTCEHMQGG-LE |
| (C) | (SEQ ID NO: 1635) |
| Con4-23 | M-Fc-GGGGGAQ-TSQRVGCEWDPWTCQHLTYT-LE |
| (C) | (SEQ ID NO: 1636) |
| Con4-15 | M-Fc-GGGGGAQ-QWSWPPCEWDPWTCQTVWPS-LE |
| (C) | (SEQ ID NO: 1637) |
| Con4-9 | M-Fc-GGGGGAQ-GTSPSFCQWDPWTCSHMVQG-LE |
| (C) | (SEQ ID NO: 1638) |
| Con4-10 | M-Fc-GGGGGAQ-TQGLHQCEWDPWTCKVLWPS-LE |
| (C) | (SEQ ID NO: 1639) |
| Con4-22 | M-Fc-GGGGGAQ-VWRSQVCQWDPWTCNLGGDW-LE |
| (C) | (SEQ ID NO: 1640) |
| Con4-3 | M-Fc-GGGGGAQ-DKILEECQWDPWTCQFFYGA-LE |
| (C) | (SEQ ID NO: 1641) |
| Con4-5 | M-Fc-GGGGGAQ-ATFARQCQWDPWTCALGGNW-LE |
| (C) | (SEQ ID NO: 1642) |
| Con4-30 | M-Fc-GGGGGAQ-GPAQEECEWDPWTCEPLPLM-LE |
| (C) | (SEQ ID NO: 1643) |
| Con4-26 | M-Fc-GGGGGAQ-RPEDMCSQWDPWTWHLQGYC-LE |
| (C) | (SEQ ID NO: 1644) |
| Con4-7 | M-Fc-GGGGGAQ-LWQLAVCQWDPQTCDHMGAL-LE |
| (C) | (SEQ ID NO: 1645) |
| Con4-12 | M-Fc-GGGGGAQ-TQLVSLCEWDPWTCRLLDGW-LE |
| (C) | (SEQ ID NO: 1646) |
| Con4-13 | M-Fc-GGGGGAQ-MGGAGRCEWDPWTCQLLQGW-LE |
| (C) | (SEQ ID NO: 1647) |
| Con4-14 | M-Fc-GGGGGAQ-MFLPNECQWDPWTCSNLPEA-LE |
| (C) | (SEQ ID NO: 1648) |
| Con4-2 | M-Fc-GGGGGAQ-FGWSHGCEWDPWTCRLLQGW-LE |
| (C) | (SEQ ID NO: 1649) |
| Con4-6 | M-Fc-GGGGGAQ-WPQTEGCQWDPWTCRLLHGW-LE |
| (C) | (SEQ ID NO: 1650) |
| Con4-24 | M-Fc-GGGGGAQ-PDTRQGCQWDPWTCRLYGMW-LE |
| (C) | (SEQ ID NO: 1651) |
| AC1-Con4 | M-Fc-GGGGGAQ-TWPQDKCEWDPWTCRLLQGW-LE |
| (C) | (SEQ ID NO: 1652) |
| AC3-Con4 | M-Fc-GGGGGAQ-DKILEECEWDPWTCRLLQGW-LE |
| (C) | (SEQ ID NO: 1653) |
| AC5-Con4 | M-Fc-GGGGGAQ-AATQEECEWDPWTCRLLQGW-LE |
| (C) | (SEQ ID NO: 1654) |
| L1 | |
| Derived | |
| Affinity- | |
| Matured | |
| Pbs | Peptibody Sequence (Seq Id No:) |
| L1-7 | MGAQ-TNFMPMDDLEQRLYEQFILQQG-LEGGGGG-Fc |
| (N) | (SEQ ID NO: 1655) |
| C6-L1 | MGAQ-TNYKPLDELDATLYEHWILQHS LEGGGGG-Fc |
| (N) | (SEQ ID NO: 1656) |
| L1-15 | MGAQ-QKYQPLDELDKTLYDQFMLQQG LEGGGGG-Fc |
| (N) | (SEQ ID NO: 1657) |
| L1-2 | MGAQ-LNFTPLDELEQTLYEQWTLQQS LEGGGGG-Fc |
| (N) | (SEQ ID NO: 1658) |
| L1-10 | MGAQ-QKFQPLDELEQTLYEQFMLQQA LEGGGGG-Fc |
| (N) | (SEQ ID NO: 1659) |
| L1-13 | MGAQ-QEYEPLDELDETLYNQWMFHQR LEGGGGG-Fc |
| (N) | (SEQ ID NO: 1660) |
| L1-5 | MGAQ-VKYKPLDELDEILYEQQTFQER LEGGGGG-Fc |
| (N) | (SEQ ID NO: 1661) |
| L1-C2 | MGAQ-TKFQPLDELDQTLYEQWTLQQR LEGGGGG-Fc |
| (N) | (SEQ ID NO: 1662) |
| L1-C3 | MGAQ-TNFQPLDELDQTLYEQWTLQQR LEGGGGG-Fc |
| (N) | (SEQ ID NO: 1663) |
| L1-11 | MGAQ-QNFKPMDELEDTLYKQFLFQHS LEGGGGG-Fc |
| (N) | (SEQ ID NO: 1664) |
| L1-17 | MGAQ-VKYKPLDELDEWLYHQFTLHHQ LEGGGGG-Fc |
| (N) | (SEQ ID NO: 1665) |
| L1-12 | MGAQ-YKFTPLDDLEQTLYEQWTLQHV LEGGGGG-Fc |
| (N) | (SEQ ID NO: 1666) |
| L1-1 | MGAQ-QNYKPLDELDATLYEHFIFHYT LEGGGGG-Fc |
| (N) | (SEQ ID NO: 1667) |
| L1-4 | MGAQ-VKFKPLDALEQTLYEHWMFQQA LEGGGGG-Fc |
| (N) | (SEQ ID NO: 1668) |
| L1-20 | MGAQ-EDYMPLDALDAQLYEQFILLHG LEGGGGG-Fc |
| (N) | (SEQ ID NO: 1669) |
| L1-22 | MGAQ-YKFNPMDELEQTLYEEFLFQHA LEGGGGG-Fc |
| (N) | (SEQ ID NO: 1670) |
| L1-14 | MGAQ-SNFMPLDELEQTLYEQFMLQHQ LEGGGGG-Fc |
| (N) | (SEQ ID NO: 1671) |
| L1-16 | MGAQ-QKFQPLDELEETLYKQWTLQQR LEGGGGG-Fc |
| (N) | (SEQ ID NO: 1672) |
| L1-18 | MGAQ-QKFMPLDELDEILYEQFMFQQS LEGGGGG-Fc |
| (N) | (SEQ ID NO: 1673) |
| L1-3 | MGAQ-TKFNPLDELEQTLYEQWTLQHQ LEGGGGG-Fc |
| (N) | (SEQ ID NO: 1674) |
| L1-21 | MGAQ-HTFQPLDELEETLYYQWLYDQL LEGGGGG-Fc |
| (N) | (SEQ ID NO: 1675) |
| L1-C1 | MGAQ-QKFKPLDELEQTLYEQWTLQQR LEGGGGG-Fc |
| (N) | (SEQ ID NO: 1676) |
| L1-19 | MGAQ-QTFQPLDDLEEYLYEQWIRRYH LEGGGGG-Fc |
| (N) | (SEQ ID NO: 1677) |
| L1-9 | MGAQ-SKFKLPLDELEQTLYEQWTLQHA LEGGGGG-Fc |
| (N) | (SEQ ID NO: 1678) |
| Con1 | |
| Derived | |
| Affinity- | |
| Matured | |
| Pbs | Peptibody Sequence (Seq Id No:) |
| Con1-4 | M-Fc-GGGGGAQ-SGQLRPCEEIFGCGTQNLAL-LE |
| (C) | (SEQ ID NO: 1679) |
| Con1-1 | M-Fc-GGGGGAQ-AGGMRPYDGMLGWPNYDVQA-LE |
| (C) | (SEQ ID NO: 1680) |
| Con1-6 | M-Fc-GGGGGAQ-GQDLRPCEDMFGCGTKDWYG-LE |
| (C) | (SEQ ID NO: 1681) |
| Con1-3 | M-Fc-GGGGGAQ-APGQRPYDGMLGWPTYQRIV-LE |
| (C) | (SEQ ID NO: 1682) |
| Con1-2 | M-Fc-GGGGGAQ-QTWDDPCMHILGPVTWRRCI-LE |
| (C) | (SEQ ID NO: 1683) |
| Con1-5 | M-Fc-GGGGGAQ-FGDKRPLECMFGGPIQLCPR-LE |
| (C) | (SEQ ID NO: 1684) |
| Parent: | M-Fc-GGGGGAQ-KRPCEEIFGGCTYQ-LE |
| Con1 (C) | (SEQ ID NO: 1685) |
| 12-9 | |
| Derived | |
| Affinity- | |
| Matured | |
| Pbs | Peptibody Sequence (Seq Id No:) |
| 12-9-3 | M-Fc-GGGGGAQ-LQEWCEGVEDPFTFGCEKQR-LE |
| (C) | (SEQ ID NO: 1686) |
| 12-9-7 | M-Fc-GGGGGAQ-MLDYCEGMDDPFTFGCDKQM-LE |
| (C) | (SEQ ID NO: 1687) |
| 12-9-6 | M-Fc-GGGGGAQ-HQEYCEGMEDPFTFGCEYQG-LE |
| (C) | (SEQ ID NO: 1688) |
| 12-9-C2 | M-Fc-GGGGGAQ-LQDYCEGVEDPFTFGCENQR-LE |
| (C) | (SEQ ID NO: 1689) |
| 12-9-5 | M-Fc-GGGGGAQ-LLDYCEGVQDPFTFGCENLD-LE |
| (C) | (SEQ ID NO: 1690) |
| 12-9-1 | M-Fc-GGGGGAQ-GFEYCDGMEDPFTFGCDKQT-LE |
| (C) | (SEQ ID NO: 1691) |
| 12-9-4 | M-Fc-GGGGGAQ-AQDYCEGMEDPFTFGCEMQK-LE |
| (C) | (SEQ ID NO: 1692) |
| 12-9-C1 | M-Fc-GGGGGAQ-LQDYCEGVEDPFTFGCEKQR-LE |
| (C) | (SEQ ID NO: 1693) |
| 12-9-2 | M-Fc-GGGGGAQ-KLEYCDGMEDPFTQGCDNQS-LE |
| (C) | (SEQ ID NO: 1694) |
| Parent: | M-Fc-GGGGGAQ-FDYCEGVEDPFTFGCDNH-LE |
| 12-9 (C) | (SEQ ID NO: 1695) |

[0227] In addition to the TMP compounds set out in Table 6, the invention provides numerous other TMP compounds. In one aspect, TMP compounds comprise the following general structure:

TMP₁-(L₁)ₙ-TMP₂

wherein TMP₁ and TMP₂ are each independently selected from the group of compounds comprising the core structure:

X₂-X₃-X₄-X₅-X₆-X₇-X₈-X₉-X₁₀,

wherein,

[0228] X₂ is selected from the group consisting of Glu, Asp, Lys, and Val;

[0229] X₃ is selected from the group consisting of Gly and Ala;

[0230] X₄ is Pro;

[0231] X₅ is selected from the group consisting of Thr and Ser;

[0232] X₆ is selected from the group consisting of Leu, Ile, Val, Ala, and Phe;

[0233] X₇ is selected from the group consisting of Arg and Lys;

[0234] X₈ is selected from the group consisting of Gln, Asn, and Glu;

[0235] X₉ is selected from the group consisting of Trp, Tyr, and Phe;

[0236] X₁₀ is selected from the group consisting of Leu, Ile, Val, Ala, Phe, Met, and Lys;

[0237] L₁ is a linker as described herein; and

[0238] n is 0 or 1;

and physiologically acceptable salts thereof.

[0239] In one embodiment, L₁ comprises (Gly)ₙ, wherein n is 1 through 20, and when n is greater than 1, up to half of the Gly residues may be substituted by another amino acid selected from the remaining 19 natural amino acids or a stereoisomer thereof.

[0240] In addition to the core structure X₂—X₁₀ set forth above for TMP₁ and TMP₂, other related structures are also possible wherein one or more of the following is added to the TMP₁ and/or TMP₂ core structure: X₁ is attached to the N-terminus and/or X₁₁, X₁₂, X₁₃, and/or X₁₄ are attached to the C-terminus, wherein X₁, X₁₂, X₁₃, and X₁₄ are as follows:

[0241] X₁ is selected from the group consisting of Ile, Ala, Val, Leu, Ser, and Arg;

[0242] X₁₁ is selected from the group consisting of Ala, Ile, Val, Leu, Phe, Ser, Thr, Lys, His, and Glu;

[0243] X₁₂ is selected from the group consisting of Ala, Ile, Val, Leu, Phe, Gly, Ser, and Gln;

[0244] X₁₃ is selected from the group consisting of Arg, Lys, Thr, Val, Asn, Gln, and Gly; and

[0245] X₁₄ is selected from the group consisting of Ala, Ile, Val, Leu, Phe, Thr, Arg, Glu, and Gly.

[0246] TMP compounds of the invention are made up of, i.e., comprising, at least 9 subunits (X₂—X₁₀), wherein X₂—X₁₀ comprise the core structure. The X₂—X₁₄ subunits are amino acids independently selected from among the 20 naturally-occurring amino acids, however, the invention embraces compounds where X₂—X₁₄ are independently selected from the group of atypical, non-naturally occurring amino acids well known in the art. Specific amino acids are identified for each position. For example, X₂ may be Glu, Asp, Lys, or Val. Both three-letter and single letter abbreviations for amino acids are used herein; in each case, the abbreviations are the standard ones used for the 20 naturally-occurring amino acids or well-known variations thereof. These amino acids may have either L or D stereochemistry (except for Gly, which is neither L nor D), and the TMPs (as well as all other compounds of the invention) may comprise a combination of stereochemistries. The invention also provides reverse TMP molecules (as well as for all other peptides disclosed herein) wherein the amino terminal to carboxy terminal sequence of the amino acids is reversed. For example, the reverse of a molecule having the normal sequence X₁₁X₂-X₃ would be X₃—X₂—X₁. The invention also provides retro-reverse TMP molecules (as well as for all other molecules of the invention described herein) wherein, like a reverse TMP, the amino terminal to carboxy terminal sequence of amino acids is reversed and residues that are normally “L” enantiomers in TMP are altered to the “D” stereoisomer form.

[0247] Exemplary TMP compounds of the invention therefore include without limitation the following compounds:

| | |
|---|---|
| IEGPTLRQWLAARA-GPNG-IEGPTLRQWLAARA | (SEQ. ID NO: 993) |
| [chemical structure] | (SEQ. ID NO: 994) |
| IEGPTLRQCLAARA-GGGGGGGG-IEGPTLRQCLAARA (linear) | (SEQ. ID NO: 995) |
| IEGPTLRQALAARA-GGGGGGGG-IEGPTLRQALAARA | (SEQ. ID NO: 996) |
| IEGPTLRQWLAARA-GGGKGGGG-IEGPTLRQWLAARA | (SEQ. ID NO: 997) |
| IEGPTLRQWLAARA-GGGK(BrAc)GGGG-IEGPTLRQWLAARA | (SEQ. ID NO: 998) |
| IEGPTLRQWLAARA-GGGCGGGG-IEGPTLRQWLAARA | (SEQ. ID NO: 999) |
| IEGPTLRQWLAARA-GGGK(PEG)GGGG-IEGPTLRQWLAARA | (SEQ. ID NO: 1000) |
| IEGPTLRQWLAARA-GGGC(PEG)GGGG-IEGPTLRQWLAARA | (SEQ. ID NO: 1001) |
| IEGPTLRQWLAARA-GGGNGSGG-IEGPTLRQWLAARA | (SEQ. ID NO: 1002) |
| [chemical structure] | (SEQ. ID NO: 1003) |
| IEGPTLRQWLAARA-GGGGGGGG-IEGPTLRQWLAARA | (SEQ. ID NO: 1004) |
| Fc-IEGPTLRQWLAARA-GPNG-IEGPTLRQWLAARA | (SEQ. ID NO: 1005) |
| Fc-IEGPTLRQWLAARA-GPNG-IEGPTLRQWLAARA-Fc | (SEQ. ID NO: 1006) |
| IEGPTLRQWLAARA-GGGGGGGG-IEGPTLRQWLAARA-Fc | (SEQ. ID NO: 1007) |
| Fc-GG-IEGPTLRQWLAARA-GPNG-IEGPTLRQWLAARA | (SEQ. ID NO: 1008) |
| Fc-IEGPTLRQWLAARA-GGGGGGGG-IEGPTLRQWLAARA | (SEQ. ID NO: 1009) |
| [chemical structure] | (SEQ. IDNO: 1010) |
| Fc-IEGPTLRQCLAARA-GGGGGGGG-IEGPTLRQCLAARA (linear) | (SEQ. ID NO: 1011) |
| Fc-IEGPTLRQALAARA-GGGGGGGG-IEGPTLRQALAARA | (SEQ. ID NO: 1012) |
| Fc-IEGPTLRQWLAARA-GGGKGGGG-IEGPTLRQWLAARA | (SEQ. ID NO: 1013) |
| Fc-IEGPTLRQWLAARA-GGGCGGGG-IEGPTLRQWLAARA | (SEQ. ID NO: 1014) |
| Fc-IEGPTLRQWLAARA-GGGNGSGG-IEGPTLRQWLAARA | (SEQ. ID NO: 1015) |
| [chemical structure] | (SEQ. ID NO: 1016) |
| Fc-GGGGG-IEGPTLRQWLAARA-GGGGGGGG-IEGPTLRQWLAARA | (SEQ. ID NO: 1017) |

[0248] Derivatives

[0249] The invention also contemplates derivatizing the peptide and/or vehicle portion (as discussed below) of the compounds. Such derivatives may improve the solubility, absorption, biological half life, and the like of the compounds. The moieties may alternatively eliminate or attenuate any undesirable side-effect of the compounds and the like. Exemplary derivatives include compounds in which:

[0250] 1. The compound or some portion thereof is cyclic. For example, the peptide portion may be modified to contain two or more Cys residues (e.g., in the linker), which could cyclize by disulfide bond formation. For citations to references on preparation of cyclized derivatives, see Table 2.

[0251] 2. The compound is cross-linked or is rendered capable of cross-linking between molecules. For example, the peptide portion may be modified to contain one Cys residue and thereby be able to form an intermolecular disulfide bond with a like molecule. The compound may also be cross-linked through its C-terminus, as in the molecule shown below.

[chemical structure]

[0252] 3. One or more peptidyl [—C(O)NR—] linkages (bonds) is replaced by a non-peptidyl linkage. Exemplary non-peptidyl linkages are —CH2-carbamate [—CH2-OC(O)NR—], phosphonate, —CH2-sulfonamide [—CH2-S(O)₂NR-], urea [—NHC(O)NH—], —CH2-secondary amine, and alkylated peptide [—C(O)NR6- wherein R6 is lower alkyl].

[0253] 4. The N-terminus is derivatized. Typically, the N-terminus may be acylated or modified to a substituted amine. Exemplary N-terminal derivative groups include —NRR1 (other than —NH2), —NRC(O)R1, —NRC(O)OR1, —NRS(O)₂R1, —NHC(O)NHR1, succinimide, or benzyloxycarbonyl-NH— (CBZ-NH—), wherein R and R1 are each independently hydrogen or lower alkyl and wherein the phenyl ring may be substituted with 1 to 3 substituents selected from the group consisting of C1-C4 alkyl, C1-C4 alkoxy, chloro, and bromo.

[0254] 5. The free C-terminus is derivatized. Typically, the C-terminus is esterified or amidated. For example, one may use methods described in the art to add (NH—CH2-CH2-NH2)₂ to compounds of this invention. Likewise, one may use methods described in the art to add —NH2 to compounds of this invention. Exemplary C-terminal derivative groups include, for example, —C(O)R2 wherein R2 is lower alkoxy or —NR3R4 wherein R3 and R4 are independently hydrogen or C1-C8 alkyl (preferably C1-C4 alkyl).

[0255] 6. A disulfide bond is replaced with another, preferably more stable, cross-linking moiety (e.g., an alkylene). See, e.g., Bhatnagar et al. (1996), J. Med. Chem. 39: 3814-9; Alberts et al. (1993) Thirteenth Am. Pep. Symp., 357-9.

[0256] 7. One or more individual amino acid residues is modified. Various derivatizing agents are known to react specifically with selected sidechains or terminal residues, as described in detail below.

[0257] 8. Heterobifunctional polymers are typically used to link proteins. An example is SMCC, or Succinimidyl-4-(N-maleimidomethyl)cyclohexane-1-carboxylate. The NHS (N-Hyroxylsuccinimide) end reacts with primary amines, which upon conjugation at pH ˜7 is optimal. Once the complex is formed, reaction of the maleimide portion of SMCC can proceed with another protein/peptide containing a free sulfhydryl group, which occurs at a much faster rate than the formation of the amide in the initial reaction. The result is a link between two proteins, for example, antibody-enzyme conjugates. An application is illustrated by the preparation of crosslinked Fab′ fragments to horseradish peroxidase (Ishikwa, et. al., 1983a,b; Yoshitake et al., 1982a,b; Imagawa et al, 1982; Uto et al., 1991). The use of Sulfo SMCC (Sulfosuccinimidyl-4-(N-maleimidomethyl)cyclohexane-1-carboxylate) allows for water solubility so that an organic solubilization step is not needed, allowing for greater flexibility and less disruption of activity in reacting with proteins.

[0258] Lysinyl residues and amino terminal residues may be reacted with succinic or other carboxylic acid anhydrides, which reverse the charge of the lysinyl residues. Other suitable reagents for derivatizing alpha-amino-containing residues include imidoesters such as methyl picolinimidate; pyridoxal phosphate; pyridoxal; chloroborohydride; trinitrobenzenesulfonic acid; O-methylisourea; 2,4 pentanedione; and transaminase-catalyzed reaction with glyoxylate.

[0259] Arginyl residues may be modified by reaction with any one or combination of several conventional reagents, including phenylglyoxal, 2,3-butanedione, 1,2-cyclohexanedione, and ninhydrin. Derivatization of arginyl residues requires that the reaction be performed in alkaline conditions because of the high pKa of the guanidine functional group. Furthermore, these reagents may react with the groups of lysine as well as the arginine epsilon-amino group.

[0260] Specific modification of tyrosyl residues has been studied extensively, with particular interest in introducing spectral labels into tyrosyl residues by reaction with aromatic diazonium compounds or tetranitromethane. Most commonly, N-acetylimidizole and tetranitromethane are used to form O-acetyl tyrosyl species and 3-nitro derivatives, respectively.

[0261] Carboxyl sidechain groups (aspartyl or glutamyl) may be selectively modified by reaction with carbodiimides (R′-N═C═N—R′) such as 1-cyclohexyl-3-(2-morpholinyl-(4-ethyl) carbodiimide or 1-ethyl-3-(4-azonia-4,4-dimethylpentyl) carbodiimide. Furthermore, aspartyl and glutamyl residues may be converted to asparaginyl and glutaminyl residues by reaction with ammonium ions.

[0262] Glutaminyl and asparaginyl residues may be deamidated to the corresponding glutamyl and aspartyl residues. Alternatively, these residues are deamidated under mildly acidic conditions. Either form of these residues falls within the scope of this invention.

[0263] Cysteinyl residues can be replaced by amino acid residues or other moieties either to eliminate disulfide bonding or, conversely, to stabilize cross-linking. See, e.g., Bhatnagar et al. (1996), J. Med. Chem. 39: 3814-9.

[0264] Derivatization with bifunctional agents is useful for cross-linking the peptides or their functional derivatives to a water-insoluble support matrix or to other macromolecular vehicles. Commonly used cross-linking agents include, e.g., 1,1-bis(diazoacetyl)-2-phenylethane, glutaraldehyde, N-hydroxysuccinimide esters, for example, esters with 4-azidosalicylic acid, homobifunctional imidoesters, including disuccinimidyl esters such as 3,3′-dithiobis(succinimidylpropionate), and bifunctional maleimides such as bis-N-maleimido-1,8-octane. Derivatizing agents such as methyl-3-[(p-azidophenyl)dithio]propioimidate yield photoactivatable intermediates that are capable of forming crosslinks in the presence of light. Alternatively, reactive water-insoluble matrices such as cyanogen bromide-activated carbohydrates and the reactive substrates described in U.S. Pat. Nos. 3,969,287; 3,691,016; 4,195,128; 4,247,642; 4,229,537; and 4,330,440 are employed for protein immobilization.

[0265] Carbohydrate (oligosaccharide) groups may conveniently be attached to sites that are known to be glycosylation sites in proteins. Generally, O-linked oligosaccharides are attached to serine (Ser) or threonine (Thr) residues while N-linked oligosaccharides are attached to asparagine (Asn) residues when they are part of the sequence Asn-X-Ser/Thr, where X can be any amino acid except proline. X is preferably one of the 19 naturally occurring amino acids other than proline. The structures of N-linked and O-linked oligosaccharides and the sugar residues found in each type are different. One type of sugar that is commonly found on both is N-acetylneuraminic acid (referred to as sialic acid). Sialic acid is usually the terminal residue of both N-linked and O-linked oligosaccharides and, by virtue of its negative charge, may confer acidic properties to the glycosylated compound. Such site(s) may be incorporated in the linker of the compounds of this invention and are preferably glycosylated by a cell during recombinant production of the polypeptide compounds (e.g., in mammalian cells such as CHO, BHK, COS). However, such sites may further be glycosylated by synthetic or semi-synthetic procedures known in the art.

[0266] Other possible modifications include hydroxylation of proline and lysine, phosphorylation of hydroxyl groups of seryl or threonyl residues, oxidation of the sulfur atom in Cys, methylation of the alpha-amino groups of lysine, arginine, and histidine side chains. Creighton, Proteins: Structure and Molecule Properties (W. H. Freeman & Co., San Francisco), pp. 79-86 (1983).

[0267] Compounds of the present invention may be changed at the DNA level, as well. The DNA sequence of any portion of the compound may be changed to codons more compatible with the chosen host cell. For E. coli, which is the preferred host cell, optimized codons are known in the art. Codons may be substituted to eliminate restriction sites or to include silent restriction sites, which may aid in processing of the DNA in the selected host cell. The vehicle, linker and peptide DNA sequences may be modified to include any of the foregoing sequence changes.

[0268] Isotope- and toxin-conjugated derivatives. Another set of useful derivatives are the above-described molecules conjugated to toxins, tracers, or radioisotopes. Such conjugation is especially useful for molecules comprising peptide sequences that bind to tumor cells or pathogens. Such molecules may be used as therapeutic agents or as an aid to surgery (e.g., radioimmunoguided surgery or RIGS) or as diagnostic agents (e.g., radioimmunodiagnostics or RID).

[0269] As therapeutic agents, these conjugated derivatives possess a number of advantages. They facilitate use of toxins and radioisotopes that would be toxic if administered without the specific binding provided by the peptide sequence. They also can reduce the side-effects that attend the use of radiation and chemotherapy by facilitating lower effective doses of the conjugation partner.

[0270] Useful conjugation partners include:
[0271] radioisotopes, such as 90Yttrium, 131Iodine, 225Actinium, and 213Bismuth;
[0272] ricin A toxin, microbially derived toxins such as Pseudomonas endotoxin (e.g., PE38, PE40), and the like;
[0273] partner molecules in capture systems (see below);
[0274] biotin, streptavidin (useful as either partner molecules in capture systems- or as tracers, especially for diagnostic use); and
[0275] cytotoxic agents (e.g., doxorubicin).

[0276] One useful adaptation of these conjugated derivatives is use in a capture system. In such a system, the molecule of the present invention would comprise a benign capture molecule. This capture molecule would be able to specifically bind to a separate effector molecule comprising, for example, a toxin or radioisotope. Both the vehicle-conjugated molecule and the effector molecule would be administered to the patient. In such a system, the effector molecule would have a short half-life except when bound to the vehicle-conjugated capture molecule, thus minimizing any toxic side-effects. The vehicle-conjugated molecule would have a relatively long half-life but would be benign and non-toxic. The specific binding portions of both molecules can be part of a known specific binding pair (e.g., biotin, streptavidin) or can result from peptide generation methods such as those described herein.

[0277] Such conjugated derivatives may be prepared by methods known in the art. In the case of protein effector molecules (e.g., Pseudomonas endotoxin), such molecules can be expressed as fusion proteins from correlative DNA constructs. Radioisotope conjugated derivatives may be prepared, for example, as described for the BEXA antibody (Coulter). Derivatives comprising cytotoxic agents or microbial toxins may be prepared, for example, as described for the BR96 antibody (Bristol-Myers Squibb). Molecules employed in capture systems may be prepared, for example, as described by the patents, patent applications, and publications from NeoRx. Molecules employed for RIGS and RID may be prepared, for example, by the patents, patent applications, and publications from NeoProbe.

[0278] Vehicles

[0279] The invention requires the presence of at least one vehicle attached to a peptide through the N-terminus, C-terminus or a sidechain of one of the amino acid residues. Multiple vehicles may also be used. In one aspect, an Fc domain is the vehicle. The Fc domain may be fused to the N or C termini of the peptides or at both the N and C termini.

[0280] In various embodiments of the invention, the Fc component is either a native Fc or an Fc variant. The immunoglobulin source of the native Fc is, in one aspect, of human origin and may, in alternative embodiments, be of any class of immunoglobulin. Native Fc domains are made up of monomeric polypeptides that may be linked into dimeric or multimeric forms by covalent (i.e., disulfide bonds) and/or non-covalent association. The number of intermolecular disulfide bonds between monomeric subunits of native Fc molecules ranges from one to four depending on class (e.g., IgG, IgA, IgE) or subclass (e.g., IgG1, IgG2, IgG3, IgA1, IgGA2). One example of a native Fc is a disulfide-bonded dimer resulting from papain digestion of an IgG (see Ellison et al. (1982), Nucleic Acids Res. 10: 4071-9).

[0281] It should be noted that Fc monomers will spontaneously dimerize when the appropriate cysteine residues are present, unless particular conditions are present that prevent dimerization through disulfide bond formation. Even if the cysteine residues that normally form disulfide bonds in the Fc dimer are removed or replaced by other residues, the monomeric chains will generally form a dimer through non-covalent interactions. The term “Fc” herein is used to mean any of these forms: the native monomer, the native dimer (disulfide bond linked), modified dimers (disulfide and/or non-covalently linked), and modified monomers (i.e., derivatives).

[0282] As noted, Fc variants are suitable vehicles within the scope of this invention. A native Fc may be extensively modified to form an Fc variant, provided binding to the salvage receptor is maintained; see, for example WO 97/34631 and WO 96/32478. In such Fc variants, one may remove one or more sites of a native Fc that provide structural features or functional activity not required by the fusion molecules of this invention. One may remove these sites by, for example, substituting or deleting residues, inserting residues into the site, or truncating portions containing the site. The inserted or substituted residues may also be altered amino acids, such as peptidomimetics or D-amino acids. Fc variants may be desirable for a number of reasons, several of which are described herein. Exemplary Fc variants include molecules and sequences in which:

[0283] 1. Sites involved in disulfide bond formation are removed. Such removal may avoid reaction with other cysteine-containing proteins present in the host cell used to produce the molecules of the invention. For this purpose, the cysteine-containing segment at the N-terminus may be truncated or cysteine residues may be deleted or substituted with other amino acids (e.g., alanyl, seryl). Even when cysteine residues are removed, the single chain Fc domains can still form a dimeric Fc domain that is held together non-covalently.

[0284] 2. A native Fc is modified to make it more compatible with a selected host cell. For example, one may remove the PA sequence near the N-terminus of a typical native Fc, which may be recognized by a digestive enzyme in E. coli such as proline iminopeptidase. One may also add an N-terminal methionine residue, especially when the molecule is expressed recombinantly in a bacterial cell such as E. coli.

[0285] 3. A portion of the N-terminus of a native Fc is removed to prevent N-terminal heterogeneity when expressed in a selected host cell. For this purpose, one may delete any of the first 20 amino acid residues at the N-terminus, particularly those at positions 1, 2, 3, 4 and 5.

[0286] 4. One or more glycosylation sites are removed. Residues that are typically glycosylated (e.g., asparagine) may confer cytolytic response. Such residues may be deleted or substituted with unglycosylated residues (e.g., alanine).

[0287] 5. Sites involved in interaction with complement, such as the C1q binding site, are removed. For example, one may delete or substitute the EKK sequence of human IgG1. Complement recruitment may not be advantageous for the molecules of this invention and so may be avoided with such an Fc variant.

[0288] 6. Sites are removed that affect binding to Fc receptors other than a salvage receptor. A native Fc may have sites for interaction with certain white blood cells that are not required for the fusion molecules of the present invention and so may be removed.

[0289] 7. The ADCC site is removed. ADCC sites are known in the art; see, for example, Molec. Immunol. 29 (5): 633-9 (1992) with regard to ADCC sites in IgG1. These sites, as well, are not required for the fusion molecules of the present invention and so may be removed.

[0290] 8. When the native Fc is derived from a non-human antibody, the native Fc may be humanized. Typically, to humanize a native Fc, one will substitute selected residues in the non-human native Fc with residues that are normally found in human native Fc. Techniques for antibody humanization are well known in the art.

[0291] An alternative vehicle would be a protein, polypeptide, peptide, antibody, antibody fragment, or small molecule (e.g., a peptidomimetic compound) capable of binding to a salvage receptor. For example, one could use as a vehicle a polypeptide as described in U.S. Pat. No. 5,739,277, issued Apr. 14, 1998 to Presta et al. Peptides could also be selected by phage display for binding to the FcRn salvage receptor. Such salvage receptor-binding compounds are also included within the meaning of “vehicle” and are within the scope of this invention. Such vehicles should be selected for increased half-life (e.g., by avoiding sequences recognized by proteases) and decreased immunogenicity (e.g., by favoring non-immunogenic sequences, as discovered in antibody humanization).

[0292] Variants, analogs or derivatives of the Fc portion may be constructed by, for example, making various substitutions of residues or sequences.

[0293] Variant (or analog) polypeptides include insertion variants, wherein one or more amino acid residues supplement an Fc amino acid sequence. Insertions may be located at either or both termini of the protein, or may be positioned within internal regions of the Fc amino acid sequence. Insertion variants, with additional residues at either or both termini, can include for example, fusion proteins and proteins including amino acid tags or labels. For example, the Fc molecule may optionally contain an N-terminal Met, especially when the molecule is expressed recombinantly in a bacterial cell such as E. coli.

[0294] In Fc deletion variants, one or more amino acid residues in an Fc polypeptide are removed. Deletions can be effected at one or both termini of the Fc polypeptide, or with removal of one or more residues within the Fc amino acid sequence. Deletion variants, therefore, include all fragments of an Fc polypeptide sequence.

[0295] In Fc substitution variants, one or more amino acid residues of an Fc polypeptide are removed and replaced with alternative residues. In one aspect, the substitutions are conservative in nature and conservative substitutions of this type are well known in the art. Alternatively, the invention embraces substitutions that are also non-conservative. Exemplary conservative substitutions are described in Lehninger, [Biochemistry, 2nd Edition; Worth Publishers, Inc. New York (1975), pp. 71-77] and set out immediately below.

CONSERVATIVE SUBSTITUTIONS I

| SIDE CHAIN CHARACTERISTIC | AMINO ACID |
|---|---|
| Non-polar (hydrophobic): | |
| A. Aliphatic | A L I V P |
| B. Aromatic | F W |
| C. Sulfur-containing | M |
| D. Borderline | G |
| Uncharged-polar: | |
| A. Hydroxyl | S T Y |
| B. Amides | N Q |
| C. Sulfhydryl | C |
| D. Borderline | G |
| Positively charged (basic) | K R H |
| Negatively charged (acidic) | D E |

[0296] Alternative, exemplary conservative substitutions are set out immediately below.

CONSERVATIVE SUBSTITUTIONS II

| ORIGINAL RESIDUE | EXEMPLARY SUBSTITUTION |
|---|---|
| Ala (A) | Val, Leu, Ile |
| Arg (R) | Lys, Gln, Asn |
| Asn (N) | Gln, His, Lys, Arg |
| Asp (D) | Glu |
| Cys (C) | Ser |
| Gln (Q) | Asn |
| Glu (E) | Asp |
| His (H) | Asn, Gln, Lys, Arg |
| Ile (I) | Leu, Val, Met, Ala, Phe, |
| Leu (L) | Ile, Val, Met, Ala, Phe |
| Lys (K) | Arg, Gln, Asn |
| Met (M) | Leu, Phe, Ile |
| Phe (F) | Leu, Val, Ile, Ala |
| Pro (P) | Gly |
| Ser (S) | Thr |
| Thr (T) | Ser |
| Trp (W) | Tyr |
| Tyr (Y) | Trp, Phe, Thr, Ser |
| Val (V) | Ile, Leu, Met, Phe, Ala |

[0297] For example, cysteine residues can be deleted or replaced with other amino acids to prevent formation of some or all disulfide crosslinks of the Fc sequences. Each cysteine residue can be removed and/or substituted with other amino acids, such as Ala or Ser. As another example, modifications may also be made to introduce amino acid substitutions to (1) ablate the Fc receptor binding site; (2) ablate the complement (C1q) binding site; and/or to (3) ablate the antibody dependent cell-mediated cytotoxicity (ADCC) site. Such sites are known in the art, and any known substitutions are within the scope of Fc as used herein. For example, see Molecular Immunology, Vol. 29, No. 5, 633-639 (1992) with regard to ADCC sites in IgG1.

[0298] Likewise, one or more tyrosine residues can be replaced by phenylalanine residues. In addition, other variant amino acid insertions, deletions and/or substitutions are also contemplated and are within the scope of the present invention. Conservative amino acid substitutions will generally be preferred. Furthermore, alterations may be in the form of altered amino acids, such as peptidomimetics or D-amino acids.

[0299] Fc sequences of the compound may also be derivatized as described herein for peptides, i.e., bearing modifications other than insertion, deletion, or substitution of amino acid residues. Preferably, the modifications are covalent in nature, and include for example, chemical bonding with polymers, lipids, other organic, and inorganic moieties. Derivatives of the invention may be prepared to increase circulating half-life, or may be designed to improve targeting capacity for the polypeptide to desired cells, tissues, or organs.

[0300] It is also possible to use the salvage receptor binding domain of the intact Fc molecule as the Fc part of a compound of the invention, such as described in WO 96/32478, entitled “Altered Polypeptides with Increased Half-Life.” Additional members of the class of molecules designated as Fc herein are those that are described in WO 97/34631, entitled “Immunoglobulin-Like Domains with Increased Half-Lives.” Both of the published PCT applications cited in this paragraph are hereby incorporated by reference.

[0301] WSP Components

[0302] Compounds of the invention may further include at least one WSP. The WPS moiety of the molecule may be branched or unbranched. For therapeutic use of the end-product preparation, the polymer is pharmaceutically acceptable. In general, a desired polymer is selected based on such considerations as whether the polymer conjugate will be used therapeutically, and if so, the desired dosage, circulation time, resistance to proteolysis, and other considerations. In various aspects, the average molecular weight of each water soluble polymer is between about 2 kDa and about 100 kDa, between about 5 kDa and about 50 kDa, between about 12 kDa and about 40 kDa and between about 20 kDa and about 35 kDa. In yet another aspect the molecular weight of each polymer is between about 6 kDa and about 25 kDa. The term “about” as used herein and throughout, indicates that in preparations of a water soluble polymer, some molecules will weigh more, some less, than the stated molecular weight. Generally, the higher the molecular weight or the more branches, the higher the polymer/protein ratio. Other sizes may be used, depending on the desired therapeutic profile including for example, the duration of sustained release; the effects, if any, on biological activity; the ease in handling; the degree or lack of antigenicity and other known effects of a water soluble polymer on a therapeutic protein.

[0303] The WSP should be attached to a polypeptide or peptide with consideration given to effects on functional or antigenic domains of the polypeptide or peptide. In general, chemical derivatization may be performed under any suitable condition used to react a protein with an activated polymer molecule. Activating groups which can be used to link the water soluble polymer to one or more proteins include without limitation sulfone, maleimide, sulfhydryl, thiol, triflate, tresylate, azidirine, oxirane and 5-pyridyl. If attached to the peptide by reductive alkylation, the polymer selected should have a single reactive aldehyde so that the degree of polymerization is controlled.

[0304] Suitable, clinically acceptable, water soluble polymers include without limitation, PEG, polyethylene glycol propionaldehyde, copolymers of ethylene glycol/propylene glycol, monomethoxy-polyethylene glycol, carboxymethylcellulose, polyacetals, polyvinyl alcohol (PVA), polyvinyl pyrrolidone, poly-1,3-dioxolane, poly-1,3,6-trioxane, ethylene/maleic anhydride copolymer, poly (.beta.-amino acids) (either homopolymers or random copolymers), poly(n-vinyl pyrrolidone)polyethylene glycol, propropylene glycol homopolymers (PPG) and other polyakylene oxides, polypropylene oxide/ethylene oxide copolymers, polyoxyethylated polyols (POG) (e.g., glycerol) and other polyoxyethylated polyols, polyoxyethylated sorbitol, or polyoxyethylated glucose, colonic acids or other carbohydrate polymers, Ficoll or dextran and mixtures thereof.

[0305] Water Soluble Polymers can also be made to be thermally sensitive, as in the formation of reverse thermal gels. Examples include Tetronics, with tetra armed backbones, and PEG-PLGA copolymers. The hydrophilicity of polymers can be varied by substituting hydrophobic portions into the polymer chain. An example of this is in the manufacture of PLGA, in which the ratio of lactic acid to glycolic acid can be increased to allow for lower water solubility. Lower water soluble polymers may be desired in certain applications, for example in increasing the potential to interact with cell membranes. Upon reconstitution, an appropriate ratio of phospholipids may be used to induce the formation of micelles or liposomes in solution. The advantage of such a system may be in the ability to incorporate some of the protein within the micelle, with the potential benefit of prolonging delivery. Phospholipids capable of forming liposomes or micelles include DMPG, DMPC, DOPC, DOPG and appropriate secondary liposome strengthening components such as cholesterol. Certain excipients, such as DEA oleth-10 phosphate and oleth 10-phosphate, are capable of forming micelles in solution.

[0306] Polysaccharide polymers are another type of water soluble polymer which may be used for protein or peptide modification. Modifying proteins or peptides by adding polysaccharide(s), e.g., glycosylation, may increase half-life, decrease antigenicity, increase stability and decrease proteolysis. Dextrans are polysaccharide polymers comprised of individual subunits of glucose predominantly linked by α1-6 linkages. The dextran itself is available in many molecular weight ranges, and is readily available in molecular weights from about 1 kD to about 70 kD. Dextran is a suitable water soluble polymer for use in the present invention as a vehicle by itself or in combination with another vehicle (e.g., Fc). See, for example, WO 96/11953 and WO 96/05309. The use of dextran conjugated to therapeutic or diagnostic immunoglobulins has been reported; see, for example, European Patent Publication No. 0 315 456, which is hereby incorporated by reference. Dextran of about 1 kD to about 20 kD is preferred when dextran is used as a vehicle in accordance with the present invention.

[0307] In one embodiment, the WSP is PEG and the invention contemplates preparations wherein a compound is modified to include any of the forms of PEG that have been used to derivatize other proteins, such as and without limitation mono-(C1-C10) alkoxy- or aryloxy-polyethylene glycol. Polyethylene glycol propionaldehyde may have advantages in manufacturing due to its stability in water. The PEG group may be of any convenient molecular weight and may be linear or branched. The average molecular weight of PEG contemplated for use in the invention ranges from about 2 kDa to about 100 kDa, from about 5 kDa to about 50 kDa, from about 5 kDa to about 10 kDa. In another aspect, the PEG moiety has a molecular weight from about 6 kDa to about 25 kDa. PEG groups generally are attached to peptides or proteins via acylation or reductive alkylation through a reactive group on the PEG moiety (e.g., an aldehyde, amino, thiol, or ester group) to a reactive group on the target peptide or protein (e.g., an aldehyde, amino, or ester group). Using methods described herein, a mixture of polymer/peptide conjugate molecules can be prepared, and the advantage provided herein is the ability to select the proportion of polymer/peptide conjugate to include in the mixture. Thus, if desired, a mixture of peptides with various numbers of polymer moieties attached (i.e., zero, one or two) can be prepared with a predetermined proportion of polymer/protein conjugate.

[0308] A useful strategy for the PEGylation (other methods are discussed in more detail herein) of synthetic peptides consists of combining, through forming a conjugate linkage in solution, a peptide and a PEG moiety, each bearing a special functionality that is mutually reactive toward the other. The peptides can be easily prepared with conventional solid phase synthesis. The peptides are “preactivated” with an appropriate functional group at a specific site. The precursors are purified and fully characterized prior to reacting with the PEG moiety. Ligation of the peptide with PEG usually takes place in aqueous phase and can be easily monitored by reverse phase analytical HPLC. The PEGylated peptides can be easily purified by preparative HPLC and characterized by analytical HPLC, amino acid analysis and laser desorption mass spectrometry.

[0309] Linkers

[0310] Any “linker” group is optional, whether positioned between peptides, peptide and vehicle or vehicle and WSP. When present, its chemical structure is not critical, since it serves primarily as a spacer. The linker is preferably made up of amino acids linked together by peptide bonds. Thus, in preferred embodiments, the linker is made up of from 1 to 20 amino acids linked by peptide bonds, wherein the amino acids are selected from the 20 naturally occurring amino acids. Some of these amino acids may be glycosylated, as is well understood by those in the art. In a more preferred embodiment, the 1 to 20 amino acids are selected from glycine, alanine, proline, asparagine, glutamine, and lysine. Even more preferably, a linker is made up of a majority of amino acids that are sterically unhindered, such as glycine and alanine. Thus, preferred linkers are polyglycines (particularly (Gly)4, (Gly)5, (Gly)8, poly(Gly-Ala), and polyalanines. Other specific examples of linkers are:

| | |
|---|---|
| (Gly)3Lys(Gly)4; | (SEQ ID NO: 1018) |
| (Gly)3AsnGlySer(Gly)2; | (SEQ ID NO: 1019) |
| (Gly)3Cys(Gly)4; | (SEQ ID NO: 1020) |
| and | |
| GlyProAsnGlyGly. | (SEQ ID NO: 1021) |

[0311] To explain the above nomenclature, for example, (Gly)3Lys(Gly)4 means Gly-Gly-Gly-Lys-Gly-Gly-Gly-Gly. Combinations of Gly and Ala are also preferred. The linkers shown here are exemplary; linkers within the scope of this invention may be much longer and may include other residues.

[0312] Non-peptide linkers are also possible. For example, alkyl linkers such as —NH—(CH2)s—C(O)—, wherein s=2-20 could be used. These alkyl linkers may further be substituted by any non-sterically hindering group such as lower alkyl (e.g., C1-C6) lower acyl, halogen (e.g., Cl, Br), CN, NH2, phenyl, etc. An exemplary non-peptide linker is a PEG linker,

[chemical structure]

wherein n is such that the linker has a molecular weight of 100 to 5000 kD, preferably 100 to 500 kD. The peptide linkers may be altered to form derivatives in the same manner as described above.

[0313] Polypeptide and Peptide Production

[0314] A peptide having been identified may be made in transformed host cells using recombinant DNA techniques. If the vehicle component is a polypeptide, the polypeptide- or peptide-vehicle fusion product may be expressed as one. To do so, a recombinant DNA molecule encoding the peptide is first prepared using methods well known in the art. For instance, sequences coding for the peptides could be excised from DNA using suitable restriction enzymes. Alternatively, the DNA molecule could be synthesized using chemical synthesis techniques, such as the phosphoramidate method. Also, a combination of these techniques could be used. The invention therefore provides polynucleotides encoding a compound of the invention.

[0315] The invention also provides vectors encoding compounds of the invention in an appropriate host. The vector comprises the polynucleotide that encodes the compound operatively linked to appropriate expression control sequences. Methods of effecting this operative linking, either before or after the polynucleotide is inserted into the vector, are well known. Expression control sequences include promoters, activators, enhancers, operators, ribosomal binding sites, start signals, stop signals, cap signals, polyadenylation signals, and other signals involved with the control of transcription or translation.

[0316] The resulting vector having the polynucleotide therein is used to transform an appropriate host. This transformation may be performed using methods well known in the art.

[0317] Any of a large number of available and well-known host cells may be used in the practice of this invention. The selection of a particular host is dependent upon a number of factors recognized by the art. These include, for example, compatibility with the chosen expression vector, toxicity of the peptides encoded by the DNA molecule, rate of transformation, ease of recovery of the peptides, expression characteristics, bio-safety and costs. A balance of these factors must be struck with the understanding that not all hosts may be equally effective for the expression of a particular DNA sequence. Within these general guidelines, useful microbial hosts include bacteria (such as E. coli), yeast (such as Saccharomyces) and other fungi, insects, plants, mammalian (including human) cells in culture, or other hosts known in the art.

[0318] Next, the transformed host is cultured and purified. Host cells may be cultured under conventional fermentation conditions so that the desired compounds are expressed. Such fermentation conditions are well known in the art. Finally, the peptides are purified from culture by methods well known in the art.

[0319] Depending on the host cell utilized to express a compound of the invention, carbohydrate (oligosaccharide) groups may conveniently be attached to sites that are known to be glycosylation sites in proteins. Generally, O-linked oligosaccharides are attached to serine (Ser) or threonine (Thr) residues while N-linked oligosaccharides are attached to asparagine (Asn) residues when they are part of the sequence Asn-X-Ser/Thr, where X can be any amino acid except proline. X is preferably one of the 19 naturally occurring amino acids not counting proline. The structures of N-linked and O-linked oligosaccharides and the sugar residues found in each type are different. One type of sugar that is commonly found on both is N-acetylneuraminic acid (referred to as sialic acid). Sialic acid is usually the terminal residue of both N-linked and O-linked oligosaccharides and, by virtue of its negative charge, may confer acidic properties to the glycosylated compound. Such site(s) may be incorporated in the linker of the compounds of this invention and are preferably glycosylated by a cell during recombinant production of the polypeptide compounds (e.g., in mammalian cells such as CHO, BHK, COS). However, such sites may further be glycosylated by synthetic or semi-synthetic procedures known in the art.

[0320] Alternatively, the compounds may be made by synthetic methods. For example, solid phase synthesis techniques may be used. Suitable techniques are well known in the art, and include those described in Merrifield (1973), Chem. Polypeptides, pp. 335-61 (Katsoyannis and Panayotis eds.); Merrifield (1963), J. Am. Chem. Soc. 85: 2149; Davis et al. (1985), Biochem. Intl. 10: 394-414; Stewart and Young (1969), Solid Phase Peptide Synthesis; U.S. Pat. No. 3,941,763; Finn et al. (1976), The Proteins (3rd ed.) 2: 105-253; and Erickson et al. (1976), The Proteins (3rd ed.) 2: 257-527. Solid phase synthesis is the preferred technique of making individual peptides since it is the most cost-effective method of making small peptides.

[0321] Compounds that contain derivatized peptides or which contain non-peptide groups are particularly amendable to synthesis by well-known organic chemistry techniques.

[0322] WSP Modification

[0323] For obtaining a compound covalently attached to a WSP, any method described herein or otherwise known in the art is employed. Methods for preparing chemical derivatives of polypeptides or peptides will generally comprise the steps of (a) reacting the peptide with the activated polymer molecule (such as a reactive ester or aldehyde derivative of the polymer molecule) under conditions whereby the polypeptide becomes attached to one or more polymer molecules, and (b) obtaining the reaction product(s). The optimal reaction conditions will be determined based on known parameters and the desired result. For example, the larger the ratio of polymer molecules:protein, the greater the percentage of attached polymer molecule.

[0324] A biologically active molecule can be linked to a polymer through any available functional group using standard methods well known in the art. Examples of functional groups on either the polymer or biologically active molecule which can be used to form such linkages include amine and carboxy groups, thiol groups such as in cysteine resides, aldehydes and ketones, and hydroxy groups as can be found in serine, threonine, tyrosine, hydroxyproline and hydroxylysine residues.

[0325] The polymer can be activated by coupling a reactive group such as trichloro-s-triazine [Abuchowski, et al., (1977), J. Biol. Chem. 252:3582-3586, incorporated herein by reference in its entirety], carbonylimidazole [Beauchamp, et al., (1983), Anal. Biochem. 131:25-33, incorporated herein by reference in its entirety], or succinimidyl succinate [Abuchowski, et al., (1984), Cancer Biochem. Biophys. 7:175-186, incorporated herein by reference in its entirety] in order to react with an amine functionality on the biologically active molecule. Another coupling method involves formation of a glyoxylyl group on one molecule and an aminooxy, hydrazide or semicarbazide group on the other molecule to be conjugated [Fields and Dixon, (1968), Biochem. J. 108:883-887; Gaertner, et al., (1992), Bioconjugate Chem. 3:262-268; Geoghegan and Stroh, (1992), Bioconjugate Chem. 3:138-146; Gaertner, et al., (1994), J. Biol. Chem. 269:7224-7230, each of which is incorporated herein by reference in its entirety]. Other methods involve formation of an active ester at a free alcohol group of the first molecule to be conjugated using chloroformate or disuccinimidylcarbonate, which can then be conjugated to an amine group on the other molecule to be coupled [Veronese, et al., (1985), Biochem. and Biotech. 11:141-152; Nitecki, et al., U.S. Pat. No. 5,089,261; Nitecki, U.S. Pat. No. 5,281,698, each of which is incorporated herein by reference in its entirety]. Other reactive groups which may be attached via free alcohol groups are set forth in Wright, EP 0539167A2 (incorporated herein by reference in its entirety), which also describes the use of imidates for coupling via free amine groups.

[0326] Another chemistry involves acylation of the primary amines of a target using the NHS-ester of methoxy-PEG (O—[(N-succinimidyloxycarbonyl)-methyl]-O′-methylpolyethylene glycol). Acylation with methoxy-PEG-NHS results in an amide linkage which will eliminate the charge from the original primary amine. Other methods utilize mild oxidation of a target under conditions selected to target the pendant diol of the penultimate glycosyl unit sialic acid for oxidation to an aldehyde. The resultant glycoaldehyde was then reacted with a methoxy-PEG-hydrazide (O-(Hydrazinocarbonylmethyl)-O′-methylpolyethylene glycol) to form a semi-stable hydrazone between PEG and target. The hydrazone is subsequently reduced by sodium cyanoborohydride to produce a stable PEG conjugate. See for example, U.S. Pat. No. 6,586,398 (Kinstler, et al., Jul. 1, 2003), incorporated herein by reference in its entirety.

[0327] In specific applications of techniques for chemical modification, for example, U.S. Pat. No. 4,002,531 (incorporated herein by reference in its entirety) states that reductive alkylation was used for attachment of polyethylene glycol molecules to an enzyme. U.S. Pat. No. 4,179,337 (incorporated herein by reference in its entirety) discloses PEG:protein conjugates involving, for example, enzymes and insulin. U.S. Pat. No. 4,904,584 (incorporated herein by reference in its entirety) discloses the modification of the number of lysine residues in proteins for the attachment of polyethylene glycol molecules via reactive amine groups. U.S. Pat. No. 5,834,594 (incorporated herein by reference in its entirety) discloses substantially non-immunogenic water soluble PEG:protein conjugates, involving for example, the proteins IL-2, interferon alpha, and IL-1ra. The methods of Hakimi et al. involve the utilization of unique linkers to connect the various free amino groups in the protein to PEG. U.S. Pat. Nos. 5,824,784 and 5,985,265 (each of which is incorporated herein by reference in its entirety) teach methods allowing for selectively N-terminally chemically modified proteins and analogs thereof, including G-CSF and consensus interferon. Importantly, these modified proteins have advantages as relates to protein stability, as well as providing for processing advantages.

[0328] WSP modification is also described in Francis et al., In: Stability of protein pharmaceuticals: in vivo pathways of degradation and strategies for protein stabilization (Eds. Ahem., T. and Manning, M. C.) Plenum, N.Y., 1991 (incorporated herein by reference in its entirety), is used. In still another aspect, the method described in Delgado et al., “Coupling of PEG to Protein By Activation With Tresyl Chloride, Applications In Immunoaffinity Cell Preparation”, In: Fisher et al., eds., Separations Using Aqueous Phase Systems, Applications In Cell Biology and Biotechnology, Plenum Press, N.Y., N.Y., 1989 pp. 211-213 (incorporated herein by reference in its entirety), which involves the use of tresyl chloride, which results in no linkage group between the WSP moiety and the polypeptide moiety. In other aspects, attachment of a WSP is effected through use of N-hydroxy succinimidyl esters of carboxymethyl methoxy polyethylene glycol, as well known in the art.

[0329] For other descriptions of modification of a target with a WSP, see, for example, U.S. patent application No. 20030096400; EP 0 442724A2; EP 0154316; EP 0401384; WO 94/13322; U.S. Pat. Nos. 5,362,852; 5,089,261; 5,281,698; 6,423,685; 6,635,646; 6,433,135; International application WO 90/07938; Gaertner and Offord, (1996), Bioconjugate Chem. 7:38-44; Greenwald et al., Crit. Rev Therap Drug Carrier Syst. 2000; 17:101-161; Kopecek et al., J Controlled Release., 74:147-158, 2001; Harris et al., Clin Pharmacokinet. 2001; 40(7):539-51; Zalipsky et al., Bioconjug Chem. 1997; 8:111-118; Nathan et al., Macromolecules. 1992; 25:4476-4484; Nathan et al., Bioconj Chem. 1993; 4:54-62; and Francis et al., Focus on Growth Factors, 3:4-10 (1992), the disclosures of which are incorporated herein by reference in their entirety.

[0330] Reductive Alkylation

[0331] In one aspect, covalent attachment of a WSP is carried out by reductive alkylation chemical modification procedures as provided herein to selectively modify the N-terminal α-amino group, and testing the resultant product for the desired biological characteristic, such as the biological activity assays provided herein.

[0332] Reductive alkylation for attachment of a WSP to a protein or peptide exploits differential reactivity of different types of primary amino groups (e.g., lysine versus the N-terminal) available for derivatization in a particular protein. Under the appropriate reaction conditions, substantially selective derivatization of the protein at the N-terminus with a carbonyl group containing polymer is achieved.

[0333] For reductive alkylation, the polymer(s) selected could have a single reactive aldehyde group. A reactive aldehyde is, for example, polyethylene glycol propionaldehyde, which is water stable, or mono C₁-C₁₀ alkoxy or aryloxy derivatives thereof (see U.S. Pat. No. 5,252,714, incorporated herein by reference in its entirety). In one approach, reductive alkylation is employed to conjugate a PEG-aldehyde (O-(3-Oxopropyl)-O′-methylpolyethylene glycol) to a primary amine. Under appropriate conditions, this approach has been demonstrated to yield PEG conjugates predominately modified through the α-amine at the protein N-terminus.

[0334] An aldehyde functionality useful for conjugating the biologically active molecule can be generated from a functionality having adjacent amino and alcohol groups. In a polypeptide, for example, an N-terminal serine, threonine or hydroxylysine can be used to generate an aldehyde functionality via oxidative cleavage under mild conditions using periodate. These residues, or their equivalents, can be normally present, for example at the N-terminus of a polypeptide, may be exposed via chemical or enzymatic digestion, or may be introduced via recombinant or chemical methods. The reaction conditions for generating the aldehyde typically involve addition of a molar excess of sodium meta periodate and under mild conditions to avoid oxidation at other positions in the protein. The pH is preferably about 7.0. A typical reaction involves the addition of a 1.5 fold molar excess of sodium meta periodate, followed by incubation for 10 minutes at room temperature in the dark.

[0335] The aldehyde functional group can be coupled to an activated polymer containing a hydrazide or semicarbazide functionality to form a hydrazone or semicarbazone linkage. Hydrazide-containing polymers are commercially available, and can be synthesized, if necessary, using standard techniques. PEG hydrazides for use in the invention can be obtained from Shearwater Polymers, Inc., 2307 Spring Branch Road, Huntsville, Ala. 35801 (now part of Nektar Therapeutics, 150 Industrial Road, San Carlos, Calif. 94070-6256). The aldehyde is coupled to the polymer by mixing the solution of the two components together and heating to about 37° C. until the reaction is substantially complete. An excess of the polymer hydrazide is typically used to increase the amount of conjugate obtained. A typical reaction time is 26 hours. Depending on the thermal stability of the reactants, the reaction temperature and time can be altered to provide suitable results. Detailed determination of reaction conditions for both oxidation and coupling is set forth in Geoghegan and Stroh, (1992), Bioconjugate Chem. 3:138-146, and in Geoghegan, U.S. Pat. No. 5,362,852, each of which is incorporated herein by reference in its entirety.

[0336] Using reductive alkylation, the reducing agent should be stable in aqueous solution and preferably be able to reduce only the Schiff base formed in the initial process of reductive alkylation. Reducing agents are selected from, and without limitation, sodium borohydride, sodium cyanoborohydride, dimethylamine borate, trimethylamine borate and pyridine borate.

[0337] The reaction pH affects the ratio of polymer to protein to be used. In general, if the reaction pH is lower than the pKₐ of a target reactive group, a larger excess of polymer to protein will be desired. If the pH is higher than the target pKₐ, the polymer:protein ratio need not be as large (i.e., more reactive groups are available, so fewer polymer molecules are needed).

[0338] Accordingly, the reaction is performed in one aspect at a pH which allows one to take advantage of the pKₐ differences between the ε-amino groups of the lysine residues and that of the α-amino group of the N-terminal residue of the protein. By such selective derivatization, attachment of a water soluble polymer to a protein is controlled; the conjugation with the polymer takes place predominantly at the N-terminus of the protein and no significant modification of other reactive groups, such as the lysine side chain amino groups, occurs.

[0339] In one aspect, therefore, methods are provided for covalent attachment of a WSP to a target compound and which provide a substantially homogenous preparation of WSP/protein conjugate molecules, in the absence of further extensive purification as is required using other chemical modification chemistries. More specifically, if polyethylene glycol is used, methods described allow for production of an N-terminally PEGylated protein lacking possibly antigenic linkage groups, i.e., the polyethylene glycol moiety is directly coupled to the protein moiety without potentially toxic by-products.

[0340] Depending on the method of WSP attachment chosen, the proportion of WSP molecules attached to the target peptide or protein molecule will vary, as will their concentrations in the reaction mixture. In general, the optimum ratio (in terms of efficiency of reaction in that there is no excess unreacted protein or polymer) is determined by the molecular weight of the WSP selected. In addition, when using methods that involve non-specific attachment and later purification of a desired species, the ratio may depend on the number of reactive groups (typically amino groups) available.

[0341] Purification

[0342] The method of obtaining a substantially homogeneous WSP-modified preparation is, in one aspect, by purification of a predominantly single species of modified compound from a mixture of species. By way of example, a substantially homogeneous species is first separated by ion exchange chromatography to obtain material having a charge characteristic of a single species (even though other species having the same apparent charge may be present), and then the desired species is separated using size exclusion chromatography. Other methods are reported and contemplated by the invention, includes for example, PCT WO 90/04606, published May 3, 1990, which describes a process for fractionating a mixture of PEG-protein adducts comprising partitioning the PEG/protein adducts in a PEG-containing aqueous biphasic system.

[0343] Thus, one aspect of the present invention is a method for preparing a WSP-modified compound conjugate comprised of (a) reacting a compound having more than one amino group with a water soluble polymer moiety under reducing alkylation conditions, at a pH suitable to selectively activate the α-amino group at the amino terminus of the protein moiety so that said water soluble polymer selectively attaches to said α-amino group; and (b) obtaining the reaction product. Optionally, and particularly for a therapeutic product, the reaction products are separated from unreacted moieties.

[0344] As ascertained by peptide mapping and N-terminal sequencing, a preparation is provided which comprises at least 50% PEGylated peptide in a mixture of PEGylated peptide and unreacted peptide. In other embodiments, preparations are provided which comprises at least 75% PEGylated peptide in a mixture of PEGylated peptide and unreacted peptide; at least 85% PEGylated peptide in a mixture of PEGylated peptide and unreacted peptide; at least 90% PEGylated peptide in a mixture of PEGylated peptide and unreacted peptide; at least 95% PEGylated peptide in a mixture of PEGylated peptide and unreacted peptide; and at least 99% PEGylated peptide in a mixture of PEGylated peptide and unreacted peptide.

[0345] The following examples are not intended to be limiting but only exemplary of specific embodiments of the invention.

### Example 1

### mFc-TMP Expression Construct Assembly

[0346] A polynucleotide encoding a TMP fusion protein comprising a murine Fc region (mFc-TMP) was constructed by combining nucleotide sequences individually encoding murine Fc and a TMP (described in EP01124961A2). In the first round of PCR, the murine Fc-encoding component was amplified with PCR primers 3155-58 (SEQ ID NO: 1022) and 1388-00 (SEQ ID NO: 1023).

| | |
|---|---|
| 3155-58: | |
| CCGGGTAAAGGTGGAGGTGGTGGTATCGA | (SEQ ID NO: 1024) |
| 3155-59: | |
| CCACCTCCACCTTTACCCGGAGAGTGGGAG | (SEQ ID NO: 1025) |

[0347] In a separate reaction, a TMP-encoding polynucleotide was amplified with primers 1209-85 (SEQ ID NO: 1026) and 3155-59 (SEQ ID NO: 1027).

| | |
|---|---|
| 1209-85: | |
| CGTACAGGTTTACGCAAGAAAATGG | (SEQ ID NO: 1028) |
| 1388-00: | |
| CTAGTTATTGCTCAGCGG | (SEQ ID NO: 1029) |

[0348] The resulting PCR fragments were gel purified and combined in a single tube for a second round of PCR with primers 1209-85 (SEQ ID NO: 1030) and 1388-00 (SEQ ID NO: 1031). The PCR product from this second round of amplification was gel purified and digested with restriction enzymes NdeI and XhoI. The digestion fragment was purified and ligated into the vector pAMG21, previously digested with the same enzymes. This ligation mix was transformed via electroporation into E. coli and plated onto LB+Kanamycin media. Colonies were screened via PCR and DNA sequencing. A positive clone with a nucleotide sequence (SEQ ID NO: 1032) encoding the mFc-TMP fusion protein (SEQ ID NO: 1033) was identified and designated 6397.

[0349] Murine Fc-TMP fusion protein-encoding polynucleotide (SEQ ID NO: 1034)

| 1 | GATTTGATTC TAGATTTGTT TTAACTAATT AAAGGAGGAA TAACAT |
|---|---|
| Open RF: | |
| ATGGTCGACGGTTG TAAGCCATGC ATTTGTACAG TCCCAGAAGT ATCATCTGTC | |
| 101 | TTCATCTTCC CCCCAAAGCC CAAGGATGTG CTCACCATTA CTCTGACTCC |
| 151 | TAAGGTCACG TGTGTTGTGG TAGACATCAG CAAGGATGAT CCCGAGGTCC |
| 201 | AGTTCAGCTG GTTTGTAGAT GATGTGGAGG TGCACACAGC TCAGACGCAA |
| 251 | CCCCGGGAGG AGCAGTTCAA CAGCACTTTC CGCTCAGTCA GTGAACTTCC |
| 301 | CATCATGCAC CAGGACTGGC TCAATGGCAA GGAGTTCAAA TGCAGGGTCA |
| 351 | ACAGTGCAGC TTTCCCTGCC CCCATCGAGA AAACCATCTC CAAAACCAAA |
| 401 | GGCAGACCGA AGGCTCCACA GGTGTACACC ATTCCACCTC CCAAGGAGCA |
| 451 | GATGGCCAAG GATAAAGTCA GTCTGACCTG CATGATAACA GACTTCTTCC |
| 501 | CTGAAGACAT TACTGTGGAG TGGCAGTGGA ATGGGCAGCC AGCGGAGAAC |
| 551 | TACAAGAACA CTCAGCCCAT CATGGACACA GATGGCTCTT ACTTCGTCTA |
| 601 | CAGCAAGCTC AATGTGCAGA AGAGCAACTG GGAGGCAGGA AATACTTTCA |
| 651 | CCTGCTCTGT GTTACATGAG GGCCTGCACA ACCACCATAC TGAGAAGAGC |
| 701 | CTCTCCCACT CTCCGGGTAA AGGTGGAGGT GGTGGTATCG AAGGTCCGAC |
| 751 | TCTGCGTCAG TGGCTGGCTG CTCGTGCTGG TGGTGGAGGT GGCGGCGGAG |
| 801 | GTATTGAGGG CCCAACCCTT CGCCAATGGC TTGCAGCACG CGCATAA |

3′ Sequence:
TCTCGAGGATCCG CGGAAAGAAG AAGAAGAAGA AGAAAGCCCG AAAGG

[0350] Murine Fc-TMP protein sequence (SEQ ID NO: 1035)

| | |
|---|---|
| 1 | MVDGCKPCIC TVPEVSSVFI FPPKPKDVLT ITLTPKVTCV VVDISKDDPE |
| 51 | VQFSWFVDDV EVHTAQTQPR EEQFNSTFRS VSELPIMHQD WLNGKEFKCR |
| 101 | VNSAAFPAPI EKTISKTKGR PKAPQVYTIP PPKEQMAKDK VSLTCMITDF |
| 151 | FPEDITVEWQ WNGQPAENYK NTQPIMDTDG SYFVYSKLNV QKSNWEAGNT |
| 201 | FTCSVLHEGL HNHHTEKSLS HSPGKGGGGG IEGPTLRQWL AARAGGGGGG |
| 251 | GGIEGPTLRQ WLAARA* |

### Example 2

### Fermentation of Strain 6397

[0351] Fermentation of strain 6397 was initiated by inoculation of 500 mL of sterilized Luria broth with a seed culture of the strain in a shake flask. When cell density reached 0.9 at 600 nm, the contents were used to inoculate a 15 L fermentor containing 10 L of complex based growth medium (800 g glycerol, 500 g trypticase, 3 g sodium citrate, 40 g KH₂PO₄, 20 g (NH₄)₂SO₄, 5 ml Fluka P-2000 antifoam, 10 ml trace metals (ferric chloride 27.0 g/L, zinc chloride 2.00 g/L, cobalt chloride 2.00 g/L, sodium molybdate 2.00 g/L, calcium chloride 1.00 g/L, cupric sulfate 1.90 g/L, boric acid 0.50 g/L, manganese chloride 1.60 g/L, sodium citrate dihydrate 73.5 g/L), 10 ml vitamins (biotin 0.060 g/L, folic acid 0.040 g/L, riboflavin 0.42 g/L, pyridoxine HCl 1.40 g/L, niacin 6.10 g/L, pantothenic acid 5.40 g/L, sodium hydroxide 5.30 ml/L), add water to bring to 10 L). The fermenter was maintained at 37° C. and pH 7 with dissolved oxygen levels kept at a minimum of 30% saturation. When the cell density reached 13.1 OD units at 600 nm, the culture was induced by the addition 10 ml of 0.5 mg/ml N-(3-oxo-hexanoyl) homoserine lactone. At 6 hours post induction, the broth was chilled to 10° C., and the cells were harvested by centrifugation at 4550 g for 60 min at 5° C. The cell paste was then stored at −80° C.

### Example 3

### Protein Refolding

[0352] E. coli paste (300 g) from strain 6397 expressing mFc-TMP was dissolved in 2250 ml lysis buffer (50 mM Tris HCl, 5 mM EDTA, pH 8.0) and passed through a chilled microfluidizer two times at 13,000 PSI. The homogenate was then centrifuged at 11,300 g for 60 minutes at 4° C. The supernatant was discarded, and the pellet was resuspended in 2400 ml of water using a tissue grinder. The homogenate was then centrifuged at 11,300 g for 60 minutes at 4° C. The supernatant was discarded, and the pellet was resuspended in 200 ml volumes of water using a tissue grinder. The homogenate was centrifuged at 27,200 g for 30 minutes at 4° C., and the supernatant was discarded. About 12.5% of the pellet was resuspended in 28 ml 20 mM Tris HCl, pH 8.0, with 35 mg hen egg white lysozyme (Sigma, St Louis, Mo.) using a tissue grinder and incubated at 37° C. for 20 min. Following incubation, the suspension was centrifuged at 27,200 g for 30 minutes at 22° C., and the supernatant was discarded. The pellet was resuspended in 35 ml 8 M guanidine HCl, 50 mM Tris HCl, pH 8.0, after which 350 μl 1 M DTT (Sigma, St Louis, Mo.) was added and material was incubated at 37° C. for 30 minutes. The solution was then centrifuged at 27,200 g for 30 minutes at 22° C. The supernatant was then transferred to 3.5 L of refolding buffer (50 mM Tris base, 160 mM arginine HCl, 3 M urea, 20% glycerol, pH 9.5, 1 mM cysteine, 1 mM cystamine HCl) at 1 ml/min with gentle stirring at 4° C.

### Example 4

### Construct Purification

[0353] After about 40 hours incubation at 4° C. with gentle agitation, the refold solution described in Example 3 was concentrated to 500 μl using a tangential flow ultrafiltration apparatus with a 30 kDa cartridge (Satorius, Goettingen, Germany) followed by diafiltration against 3 L of Q-Buffer A (20 mM Tris HCl, pH 8.0). The concentrated material was filtered through a Whatman GF/A filter and loaded on to an 86 ml Q-Sepharose fast flow column (2.6 cm ID) (Amersham Biosciences, Piscataway, N.J.) at 15 ml/min. After washing the resin with several column volumes of Q-Buffer A, the protein was eluted using a 20 column volume linear gradient to 60% Q-Buffer B (20 mM Tris HCl, 1 M NaCl, pH 8.0) at 10 ml/min. The peak fractions were pooled, and the pool was passed through a Mustang E syringe filter (Pall Corporation, East Hills, N.Y.) at 1 ml/min. The filtered material was filtered a second time through a 0.22 μm cellulose acetate filter and stored at −80° C.

### Example 5

### Protein PEGylation

[0354] To a cooled (4° C.), stirred solution of mFc-TMP (3.5 ml, 0.8 mg/ml) in a 100 mM sodium acetate buffer, pH 5, containing 20 mM NaCNBH₃, was added a 3.8-fold molar excess of methoxypolyethylene glycol aldehyde (MPEG) (average molecular weight, 20 kDa) (Nektar). The stirring of the reaction mixture was continued at the same temperature. The extent of the protein modification during the course of the reaction was monitored by SEC HPLC using a Superose 6 HR 10/30 column (Amersham Biosciences) eluted with a 0.05 M phosphate buffer with 0.15 M NaCl, pH 7.0 at 0.4 ml/min. After 16 hours the SEC HPLC analysis indicated that the majority of the protein has been conjugated to MPEG. At this time the reaction mixture was buffer-exchanged into a 20 mM Tris/HCl buffer, pH 8.12. The MPEG-mFc-AMP2 conjugates were isolated by ion exchange chromatography using a 1 ml Hi Trap HP Q column (Amersham Biosciences) equilibrated with a 20 mM Tris/HCl buffer, pH 8.12. The reaction mixture was loaded on the column at a flow rate of 0.5 ml/min and the unreacted MPEG aldehyde was eluted with three column volumes of the starting buffer. A linear 20-column-volume gradient from 0% to 100% 20 mM Tris/HCl buffer, pH 8.12, containing 0.5 M NaCl was used to the elute the protein-polymer conjugates. Fractions (2 ml) collected during ion exchange chromatography separation were analyzed by HPLC SEC as described above. A fraction containing the mono- and di-MPEG-mFc-TMP conjugates in an approximate ratio of 2.3 to 1 (as determined by SEC HPLC) was concentrated, and sterile filtered.

### Example 6

### In vivo Testing

[0355] BDF1 mice (Charles River Laboratories, Wilmington, Mass.) were divided into groups of 10 and injected on days 0, 21, and 42 subcutaneously with either diluting agent (Dulbecco's PBS with 0.1% bovine serum albumin) or diluting agent with 50 μg test mono- and di-MPEG-mFc-TMP conjugate protein (as described above) per kg animal. Each group was divided in half and bled (140 μl) from the retro-orbital sinus on alternate time points (days 0, 3, 5, 7, 10, 12, 14, 19, 24, 26, 28, 31, 33, 40, 45, 47, 49, 52 and 59). On day 59, mice were anesthetized with isoflurane prior to bleeding. The collected blood was analyzed for a complete and differential count using an ADVIA 120 automated blood analyzer with murine software (Bayer Diagnostics, New York, N.Y.).

### Example 7

### Lyophilized Human Fc-TMP

[0356] Initial Lyophilized Formulation Screening Studies

[0357] The human Fc-TMP peptibody described herein in Example 7 corresponds to a dimeric form of SEQ ID NO:1017, wherein the human Fc is SEQ ID NO:1, having an initiator methionine at the N-terminus.

[0358] The stability of Fc-TMP was assessed by several chromatographic techniques: Reversed-Phase HPLC, Cation-Exchange HPLC, Size-Exclusion HPLC and SDS-PAGE, all of which were stability-indicating at elevated temperature. Formulations ranging in concentration from 0.1 to 40 mg/ml were examined for both chemical and physical degradation at accelerated, refrigerated and frozen temperature. Fc-TMP stability was evaluated with respect to varying pH and the inclusion of mannitol or glycine as cake-forming agents and sucrose as a lyoprotectant. Mannitol and sucrose were eventually chosen for further optimization after the other candidate (glycine) showed no improvement in protein stability. Tween-20 (polysorbate-20) was also shown to inhibit aggregation upon lyophilization over a concentration range of 0.002 to 0.1%. The following buffers were examined in screening studies over a pH range of 4-8: glycine, succinate, histidine, phosphate, and Tris. From these screening studies, Fc-TMP formulated in histidine buffer at pH 5 with a small amount of Tween-20 (0.004%) added was shown to be more optimal for stability.

[0359] Validation of Sucrose and Tween-20 in the Fc-TMP Formulation

[0360] Subsequent development efforts were focused on validating the level of sucrose, mannitol and Tween-20 in the formulation at a protein concentration of approximately 0.5 mg/ml (to accommodate the anticipated dosing requirements in the clinic). The effect of sucrose, mannitol and Tween-20 in optimizing stability was demonstrated in these studies. Follow-up studies were also initiated for the purpose of anticipating manufacturing issues and concerns.

[0361] Sucrose is Beneficial in Minimizing Chemical Degradation at Elevated Temperature

[0362] The effect of varying sucrose and mannitol concentrations on the stability of Fc-TMP was tested. The protein was formulated at 0.3 and 2 mg/ml in order to bracket the anticipated concentration range in the clinic. In addition, samples were prepared with and without 0.004% Tween-20. The ratio of sucrose:mannitol was changed by varying the amount of sucrose and adjusting the mannitol level at each sucrose concentration to maintain isotonicity. The following ratios of sucrose:mannitol were examined (expressed as percent weight per volume): 0.2:5.1; 0.5:4.8; 1:4.5; 1.5:4.3 and 2:4.

[0363] Higher ratios of sucrose:mannitol are shown to minimize chemical degradation as monitored by Cation-Exchange and Reversed-Phase HPLC. As is shown in Table 39, the percent main peak is compared initially and after elevated temperature storage of Fc-TMP for 18 weeks at 37° C. The greatest loss of cation-exchange main peak occurs in the liquid formulation (Fc-TMP formulated in 10 mM acetate, 5% sorbitol at pH 5), followed by the lyophilized formulations with 0.2, 0.5 and 1.0% sucrose, respectively. The protective effect of sucrose in minimizing chemical degradation was also observed by Reversed-Phase HPLC analysis of samples after elevated temperature storage (Table 39). The percent main peak (determined from reversed-phase HPLC analysis of Fc-TMP) drops significantly at the low sucrose levels, but does not appear to change meaningfully in formulations with sucrose concentrations of greater than 1%. Interpreted together, these results indicate that maintaining sucrose levels at 1.5% or higher is critical for the stability of Fc-TMP upon lyophilization.

TABLE 39
Fc-TMP in 10 mM Histidine, buffered at pH 5 with Tween-20
Loss of RP and CEX-HPLC Main Peak After 18 Weeks at 37° C.

| | RP-HPLC | | CEX-HPLC | |
|---|---|---|---|---|
| Formulation | Time Zero | 18 Weeks | Time Zero | 18 Weeks |
| 0.2% Sucrose, | 78.6 | 72.2 | 79.8 | 62.6 |
| 5.1% Mannitol | | | | |
| 0.5% Sucrose, | 77.3 | 73.1 | 78.9 | 71.6 |
| 4.8% Mannitol | | | | |
| 1% Sucrose, | 78.4 | 78.0 | 80.5 | 73.9 |
| 4.5% Mannitol | | | | |
| 1.5% Sucrose, | 73.2 | 79.8 | 80.5 | 78.7 |
| 4.3% Mannitol | | | | |
| 2% Sucrose, | 79.2 | 81.3 | 78.6 | 78.9 |
| 4% Mannitol | | | | |
| 10 mM Acetate, | 74.7 | 42.8 | 75.5 | 34.1 |
| 5% Sorbitol, pH 5 | | | | |
| (liquid control) | | | | |

[0364] Whereas Fc-TMP in the liquid control (the 10 mM acetate, 5% sorbitol, pH 5 formulation) has significant growth in the pre- and post-main peak area, the protein shows more degradation in the post-main peak region upon analysis of lyophilized samples with lower amounts of sucrose. Previous work with liquid stability samples (after elevated temperature storage) has shown that deamidation arises from glutamine and arginine in the protein, which contributes to the growth in the pre-peak region in liquid samples.

[0365] At refrigerated temperature, chemical degradation is not observed by cation-exchange and reversed-phase HPLC in the lyophilized formulation after long term storage. For example, cation-exchange chromatograms did not show apparent changes under varied temperatures (−80° C., 4° C. and controlled room temperature for 6 months). Due to the lack of chemical degradation in the lyophilized formulation over time at controlled room temperature and lower, much of the formulation development work centered on minimizing the physical aggregation associated with freeze-drying.

[0366] Tween-20 Minimizes Aggregation Induced by Lyophilization

[0367] The inclusion of Tween-20 at a low concentration (0.004%) is needed to minimize a small amount of aggregation which is apparent following lyophilization. This can be demonstrated by examining the relevant results from several stability studies in which samples are evaluated for stability with and without the addition of Tween-20.

[0368] A higher protein concentration of Fc-TMP was first used to explore a wide range of Tween-20 in order to investigate the amount needed to minimize aggregation. The Fc-TMP concentration in this study was 20 mg/ml, with the Tween-20 levels set at 0.002, 0.004, 0.006 and 0.01%. After storage for one year at 4° C., aggregation is limited to <0.1% in all formulations with Tween-20. Six month results also showed no meaningful aggregation. Tween-20 at 0.004% was chosen for further consideration in the formulation studies, as discussed herein, designed for Fc-TMP at 0.5 mg/ml.

[0369] Table 40 shows the amount of aggregation in Fc-TMP monitored at time zero, 3 and 11 months after storage at 4° C. In this study, Fc-TMP was lyophilized at 0.5 mg/ml in the aforementioned formulation and in formulations with varying sucrose:mannitol ratios without Tween-20 added. In addition, stability was followed in the current formulation without Tween-20 and buffered at pH 4.5, 5 and 5.5. Results show that only the aforementioned formulation has minimal aggregation at pH 5. In formulations without Tween-20, aggregation varies from 0.5% to around 5%. Aggregation is also higher at pH 4.5 and 5.5 compared to that detected at pH 5. Lower sucrose:mannitol ratios (0.2, 0.5 and 1% sucrose formulations) have higher aggregation, as levels are typically around 5%. Over time, the level of aggregation remains consistent in the aforementioned formulation and in the formulation without Tween-20 through the 1 year timepoint.

TABLE 40
Fc-TMP in 10 mM Histidine, varied formulations, 0.5 mg/ml
SEC-HPLC Measured Percent Aggregation

| | Time | | |
|---|---|---|---|
| Formulation | Zero | 3 Months | 11 Months¹ |
| 2% Sucrose, 4% Mannitol, pH 5.0 | <0.1 | <0.1 | <0.1 |
| (with 0.004% Tween-20) | | | |
| 2% Sucrose, 4% Mannitol, pH 4.5 | 2.4 | 2.9 | — |
| 2% Sucrose, 4% Mannitol, pH 5.0 | 0.5 | 1.6 | 0.8 |
| 2% Sucrose, 4% Mannitol, pH 5.5 | 2.3 | 2.5 | — |
| 0.2% Sucrose, 5.1% Mannitol, pH 5.0 | 4.8 | 7.3 | — |
| 0.5% Sucrose, 4.8% Mannitol, pH 5.0 | 5.1 | 4.4 | — |
| 1% Sucrose, 4.5% Mannitol, pH 5.0 | 4.5 | 4.3 | — |

¹The optimized formulation samples were selected for evaluation at the 11 month timepoint.

[0370] Additional formulation studies were designed to confirm the beneficial effect of Tween-20 in minimizing aggregation. All of the samples in these studies were formulated at pH 5 with and without 0.004% Tween-20. Table 41 lists the percent aggregation after storage at 4° C. for time intervals of zero, 18 weeks and 1 year in stability. At time zero, immediately following lyophilization, aggregation is minimized in all of the samples with 0.004% Tween-20. Small amounts of aggregation are observed in samples without Tween-20, with the highest amount found in the formulation with 0.2% sucrose. The effectiveness of Tween-20 in minimizing aggregation also extends to the 18 week timepoint, with higher percent aggregation found in samples lacking Tween-20 and at low sucrose: mannitol ratios. After storage for one year at 4° C., aggregation is also consistently low in the samples containing Tween-20.

TABLE 41
Fc-TMP in 10 mM Histidine, varied formulations, 0.3 mg/ml, pH 5
SEC-HPLC Measured Percent Aggregation after Storage at 4° C.

| Formulation | Time Zero | 4 Months | 1 Year¹ |
|---|---|---|---|
| 2% Sucrose, 4% Mannitol | <0.1 | 0.2 | <0.1 |
| (with 0.004% Tween-20) | | | |
| 2% Sucrose, 4% Mannitol | 0.2 | 0.2 | — |
| 0.2% Sucrose, 5.1% Mannitol | <0.1 | <0.1 | <0.1 |
| (with 0.004% Tween-20) | | | |
| 0.2% Sucrose, 5.1% Mannitol | 1.1 | 1.3 | — |
| 0.5% Sucrose, 4.8% Mannitol | <0.1 | 0.2 | <0.1 |
| (with 0.004% Tween-20) | | | |
| 0.5% Sucrose, 4.8% Mannitol | 0.2 | 0.8 | — |
| 1% Sucrose, 4.5% Mannitol | <0.1 | <0.1 | <0.1 |
| (with 0.004% Tween-20) | | | |
| 1% Sucrose, 4.5% Mannitol | 0.1 | 0.3 | — |
| 1.5% Sucrose, 4.8% Mannitol | <0.1 | <0.1 | <0.1 |
| (with 0.004% Tween-20) | | | |
| 1.5% Sucrose, 4.8% Mannitol | 0.1 | 0.3 | — |

¹Samples with Tween-20 were selected for evaluation at the 1 year timepoint.

[0371] Another stability study, designed to test the effectiveness of antioxidants in minimizing chemical degradation, reinforced the protective effect of Tween-20. Antioxidants did not have an impact in minimizing chemical degradation upon elevated temperature storage. However, the aforementioned formulation, with 0.004% Tween-20 and at an Fc-TMP concentration of 0.2 mg/ml, had <0.1% aggregation at time zero and 0.1% after 5 months storage at 4° C. The same formulation without Tween-20 had 0.4% aggregation at time zero and 1% aggregation after storage for 5 months.

[0372] The stability study results presented in Tables II, III and the aforementioned studies illustrate the protective effect of Tween-20 in minimizing aggregation upon lyophilization. The growth of aggregation over time is minimal, as timepoints extending to 1 year at 4° C. show no meaningful increases in aggregation in samples formulated with 0.004% Tween-20. Based on these stability study results which show that the addition of Tween-20 minimizes aggregation upon lyophilization, scale-up work was initiated with the recommended formulation.

[0373] Scale-Up Studies

[0374] Aggregation is Concentration Dependent

[0375] An initial scale-up study was designed to simulate manufacturing conditions and examine the robustness of the formulation with respect to shipping stress and stability upon reconstitution. Fc-TMP was buffer exchanged into the formulation buffer using a tangential flow filtration device, similar to larger scale processes. The protein was subsequently diluted to concentrations of 0.5 and 0.1 mg/ml with Tween-20 also added prior to the final filtration step. After samples were filled, lyophilization was performed. An exemplary lyophilzation process is set forth below:

Thermal Treatment Steps

| | Temp | Time | Ramp/Hold |
|---|---|---|---|
| Step #1 | −50 | 120 | R |
| Step #2 | −50 | 120 | H |
| Step #3 | −13 | 60 | R |
| Step #4 | −13 | 360 | H |
| Step #5 | −50 | 60 | R |
| Step #6 | −50 | 60 | H |

| | | |
|---|---|---|
| Freeze Temp | −50 | C. |
| Additional Freeze | 0 | min |
| Condenser Setpoint | −60 | C. |
| Vacuum Setpoint | 100 | mTorr |

Primary Drying Steps

| | temp | time | Vac | Ramp/Hold |
|---|---|---|---|---|
| Step #1 | −50 | 15 | 100 | H |
| Step #2 | −25 | 120 | 100 | R |
| Step #3 | −25 | 600 | 100 | H |
| Step #4 | −25 | 600 | 100 | H |
| Step #5 | 0 | 800 | 100 | R |
| Step #6 | 25 | 800 | 100 | R |
| Step #7 | 25 | 800 | 100 | H |
| Step #8 | 25 | 800 | 100 | H |
| Step #9 | 25 | 0 | 100 | H |
| Step #10 | 25 | 0 | 100 | H |
| Step #11 | 25 | 0 | 100 | H |
| Step #12 | 25 | 0 | 100 | H |
| Step #13 | 25 | 0 | 100 | H |
| Step #14 | 25 | 0 | 100 | H |
| Step #15 | 25 | 0 | 100 | H |
| Step #16 | 25 | 0 | 100 | H |
| Post Heat | 25 | 100 | 100 | H |

Secondary Temperature 28 C.

[0376] Passive storage at 4° C. resulted in more aggregation at the low Fc-TMP concentration (0.1 mg/ml). At time zero, aggregation was determined by SEC-HPLC to be 0.4% in the 0.1 mg/ml formulation, whereas 0.1% aggregation was detected in the protein formulated at 0.5 mg/ml. After six months storage at refrigerated temperature, the aggregation remained at the same levels as observed for the time zero samples for both concentrations of Fc-TMP, in agreement with results from previous stability studies. Due to the higher amount of aggregation observed at the lowest concentration (0.1 mg/ml) it was decided that 0.5 mg/ml would be best suited as the concentration of choice for additional scale-up work.

[0377] Aggregation Does Not Increase Upon Simulated Shear Stress

[0378] Lyophilized samples (not reconstituted) from the initial scale-up study were also subjected to simulated ground and air transportation with the aid of stress simulation equipment. Briefly, the protocol as outlined in the ASTM (American Society of Testing Methods), Method # D-4728, was followed. Simulated ground and air transportation was accomplished using an Electrodynamic Vibration Table, Model S202, and a Power Amplifier, Model # TA240 (Unholtz-Dickie Corporation, Wallingford, Conn.). Following the transportation stress, the physical appearance of the lyophilized cakes was compared to passive controls, with the result that no morphological changes of the cake were obvious. Both chemical and physical stability was acceptable, with aggregation consistent in the stressed samples and passive controls (<0.1% in the 0.5 mg/ml samples compared to 0.4% in the 0.1 mg/ml samples).

[0379] Stability upon reconstitution was examined in this study by preparing freshly reconstituted samples and incubating for 3, 7 and 14 days either passively, with slow tumbling, or vigorous shaking. Table 42 shows the results for the 0.1 and 0.5 mg/ml formulations. As is expected, the amount of aggregation is minimized in the formulations at 0.5 mg/ml. Compared to the slow tumbling over time vs. the non-tumbled samples, no meaningful increase in aggregation is apparent over the 14 day period. The amount of dimerization in these formulations (Non-tumbling and Tumbling) is also consistent. Interestingly, the shaking results appear to display a trend; i.e. the aggregation drops to less than detectable levels after time zero in both the 0.1 and 0.5 mg/ml samples. Meanwhile, there is a corresponding increase in the amount of dimerization observed in most shaken samples at each timepoint, suggesting that there is some reversibility in going from the aggregate to the dimer state upon shear stressing Fc-TMP.

TABLE 42
Fc-TMP in 10 mM Histidine, with 2% Sucrose, 4% Mannitol and
0.004% Tween-20, pH 5
SEC-HPLC Measured Percent Aggregation and
Dimerization after Storage at 4° C.

| | Time Zero | 3 Days | 7 Days | 14 Days |
|---|---|---|---|---|
| | agg, dimer | agg, dimer | agg, dimer | agg, dimer |
| 0.1 mg/ml | | | | |
| Non-Tumbling | 0.4, 0.3 | 1.2, 0.6 | 1.1, 0.4 | 1.0, 0.4 |
| Tumbling | 0.4, 0.3 | 0.7, 0.4 | 0.7, 0.3 | 1.1, 0.3 |
| Shaking | 0.4, 0.3 | <0.1, 0.9 | <0.1, 0.1 | <0.1, 1.6 |
| 0.5 mg/ml | | | | |
| Non-Tumbling | 0.1, 0.5 | 0.2, 0.5 | 0.2, 0.5 | 0.2, 0.6 |
| Tumbling | 0.1, 0.5 | 0.2, 0.6 | 0.1, 0.6 | 0.1, 0.6 |
| Shaking | 0.1, 0.5 | <0.1, 0.9 | <0.1, 1.0 | <0.1, 2.2 |

[0380] Secondary Drying for 12 Hours in the Lyophilization Cycle is Sufficient for Minimizing Residual Moisture

[0381] A second scale-up study was performed in which Fc-TMP was buffer-exchanged and diluted to 0.5 mg/ml in the recommended formulation. Lyophilization was achieved with a cycle consisting of an initial freezing step at −50° C., followed by annealing at −13° C. The temperature was then ramped down to −50° C., held for an hour, and primary drying initiated at −50° C. with a vacuum setpoint of 100 mTorr. Following a brief hold period at −50 C, the temperature was ramped down to −25° C. over a two hour period, maintained at −25° C. for 20 hours, and then gradually raised to 25° C. after around 27 hours for the beginning of secondary drying. Secondary drying was continued for a minimum of 12 hours at 25° C. During the lyophilization cycle, samples were pulled after 12, 18 and 24 hours of secondary drying in order to check the stability and compare the level of residual moisture. Results show that residual moisture, as measured by Karl Fisher Titration, is around 0.6% or less (Table 43) in all samples examined. Moisture is similarly low in the buffer placebo cakes. Based on this work, the secondary drying time of the lyophilization cycle can be shortened to a range between 12-18 hours.

TABLE 43
Residual Moisture in Fc-TMP
Secondary Drying Times Held at 12, 18 and 24 Hours

| Secondary Drying Time | Karl Fisher Percent Moisture |
|---|---|
| 12 hours | 0.23 |
| 12 hours | 0.38 |
| Buffer Placebo | 0.43 |
| 18 hours | 0.63 |
| 18 hours | 0.28 |
| Buffer Placebo | 0.3 |
| 24 hours | 0.46 |
| 24 hours | 0.37 |
| Buffer Placebo | 0.31 |

[0382] Stability results are also comparable over this secondary drying time range, as samples do not have differences with respect to chemical or physical stability. For example, the amount of aggregation is <0.1% for all samples examined, while the percent dimer is consistently at 0.1%. These results confirm that the secondary drying time can be shortened to less than 24 hours without affecting the initial stability of the protein.

[0383] Additional work was performed to evaluate the robustness of the formulation with respect to varying excipient concentrations. Since previous stability work had shown that sucrose, for example, can have an impact on stability, it was necessary to examine the robustness of Fc-TMP upon minor changes in excipient levels.

### Statistical Study of Fc-TMP

### Robustness of Formulation

[0384] An initial statistical study had been designed to examine minor changes in formulation variables such as the formulation pH, histidine buffer strength and the sucrose:mannitol ratio, using an E-chip software package. These samples were lyophilized but a non-optimal freeze-dry cycle was used which resulted in higher aggregation than typically observed. The study was a screening study, assuming a linear response surface. Results of the stability assessment showed that the pH (4.7 to 5.3) and histidine buffer strength, (varied from 5 to 15 mM), had little impact on the stability of Fc-TMP. In order to verify the contribution of Tween-20 and the sucrose:mannitol ratio in the overall stability of Fc-TMP, a follow-up statistical design study was initiated using the more optimal lyophilization cycle.

[0385] Quadratic Statistical Stability Study

[0386] The second statistical design study examined variations in Tween-20 (0.001%, 0.0045% and 0.008%), the sucrose:mannitol ratio (1.7:4.2, 2:4 and 2.3:3.8), and variations in the protein concentration (0.3, 0.65 and 1 mg/ml). The pH of the formulations were also adjusted to 4.7, 5 and 5.3, and the Histidine buffer strength varied from 7, 10 and 13 mM. Samples were prepared and lyophilized using a Virtis lyophilizer (SP Industries, Inc., Gardiner, N.Y.), with an optimized conservative cycle used for the previous stability studies. Stability results were interpreted using E-chip (statistical design software package, Hockessin, Del.) in two ways: an assessment of the impact of formulation variables on the amount of aggregation and dimerization observed at time zero, and the effect of formulation variables in affecting elevated temperature (37° C.) storage stability as measured by rates of change from time zero.

[0387] Time Zero Formulation Results from Quadratic Statistical Study

[0388] Results from the time zero assessment showed that, as expected, Tween-20 minimizes aggregation, however the protein concentration was also significant in reducing the tendency to aggregate upon freeze-drying. The E-chip software program assesses the effects that different input variables (the formulation conditions) have on Fc-TMP aggregation and dimerization during freeze-drying. With respect to Fc-TMP dimerization at time zero, not one excipient of the formulation was considered (based on E-chip results) to have a significant effect. Several formulation variables impacted the amount of aggregation observed upon freeze-drying Fc-TMP. Based on the summary results provided by E-chip, the Fc-TMP concentration had the greatest effect on the degree of aggregation observed at time zero, followed by the Tween-20 level. Aggregation is observed to be the highest, at time zero, in the low concentration samples. Likewise, higher amounts of Tween-20 have more of a protective effect in minimizing aggregation at time zero, although this trend is not as meaningful as the protein concentration effect. Higher amounts of aggregation were observed in this study compared to previous study results, and around 0.5% aggregation was observed in some samples at the lower protein concentrations with Tween-20.

[0389] It was observed that the variability in aggregation drops as the protein concentration increases. At 0.5 mg/ml and higher concentrations, Fc-TMP has average lower aggregation than in samples formulated at or below 0.3 mg/ml.

[0390] Tween-20 at 0.004% is Effective in Minimizing Aggregation upon Elevated Temperature Storage

[0391] The Statistical Design study was also used to assess changes upon elevated temperature storage. Rates of aggregation were compared in the varied formulation conditions after 16 days at 37° C. by subtracting the elevated temperature results from the initial (time zero) results and normalizing to one month's time. Rates which are negative thus refer to an apparent loss of the measured property over time. Response variables (corresponding to results from assays) were determined through RP-HPLC (percent main-peak purity and pre-peak percent), cation-exchange HPLC (percent main-peak purity), size-exclusion HPLC (aggregation and dimer formation) and NIR-water (residual moisture by infra-red spectroscopy, which was correlated with Karl Fisher Titration results in some samples to verify accuracy).

[0392] Results from a comparison of the rates of change obtained from each assay technique show that changes in aggregation and RP-HPLC oxidation were statistically significant with respect to the Fc-TMP concentration and Tween-20 squared concentration, to within two standard deviations. The Tween-20 squared term most likely arises from the quadratic nature of the study which assumes a curved response surface. In this case, the squared Tween-20 term fits the model better, in addition to possibly suggesting that there is an interactive effect with itself which affects stability. The other measured responses, such as cation-exchange HPLC main-peak purity, or the varied pH conditions, for example, did not exhibit any significant responses in affecting protein stability.

[0393] As is the case with the initial scale-up study previously discussed (tumbled, non-tumbled and shaken samples), the amount of aggregation is lower after high temperature storage. The rate of change in these samples was used to make predictions based on the statistical model (quadratic study) to anticipate the protective effect of Tween-20. Table 44 shows predictions for the amount of aggregation expected, based on the statistical design model, as the Tween-20 concentration is raised from 0 to 0.008%. As is shown, the rate of aggregation, normalized to one month at 37° C., is negative (indicating the loss of aggregate in these conditions) with the exception of 0% Tween-20, in which case aggregation would be predicted to grow. The rate of loss of aggregate appears to plateau at Tween-20 concentrations of 0.002% and higher, suggesting that Tween-20 at low levels (0.002-0.006%) is sufficient in minimizing physical degradation. The rate of growth of dimer is correspondingly similar under these conditions and was not statistically correlated with any of the formulation excipients, as previously mentioned.

TABLE 44
Statistical Quadratic Model Predictions
Varied Tween-20 and Fc-TMP Concentration
Based on 16 Days Incubation at 37° C. (normalized to one month)

| % | Fc-TMP | % SEC | | % RP-HPLC | |
|---|---|---|---|---|---|
| Tween 20 | (mg/ml) | Aggregation | prediction limits | Oxidation | prediction limits |
| 0 | 0.5 | 0.09 | (−0.32, 0.50) | 0.47 | (−2.59, 1.65) |
| 0.002 | 0.5 | −0.35 | (−0.69, −0.0) | −0.68 | (−2.44, 1.08) |
| 0.004 | 0.5 | −0.53 | (−0.87, −0.19) | −0.58 | (−2.32, 1.17) |
| 0.006 | 0.5 | −0.45 | (−0.78, −0.12) | −0.17 | (−1.86, 1.52) |
| 0.008 | 0.5 | −0.12 | (−0.46, 0.21) | 0.54 | (−1.18, 2.26) |
| 0.004 | 0.3 | −0.59 | (−0.94, −0.25) | 0.58 | (−1.18, 2.34) |
| 0.004 | 0.1 | −0.63 | (−1.10, −0.16) | 2.69 | (0.28, 5.09) |

[0394] The rate of change in RP-HPLC measured oxidation at 0.5 mg/ml, assuming that this corresponds to changes in the pre-peak region of each chromatogram, is not statistically significant with respect to the Tween-20 squared term. In this case, the model (as shown in Table 44) predicts that as the Tween-20 concentration is varied the rate of oxidation is consistent with the limits of the prediction intervals. The protein concentration affects oxidation, as the rate of growth increases from 0.58 to 2.69 as the protein concentration drops from 0.3 to 0.1 mg/ml (while keeping the Tween-20 constant at 0.004%.).

[0395] These results suggest that maintaining the Tween-20 concentration between 0.002 to 0.006% is desirable from a stability standpoint. The amount of protein is also important, as the stability is worse at concentrations below 0.5 mg/ml.

[0396] Refrigerated Temperature Stability

[0397] Considering the above, the following formulation was used for assessing the refrigerated temperature stability of lyophilized Fc-TMP: 0.5 mg/ml Fc-TMP in 10 mM Histidine buffered at pH 5, 2% Sucrose, 4% Mannitol, and 0.004% Tween-20.

[0398] The formulation was monitored for refrigerated temperature stability for a period of one year. Table 45 shows the stability results from this study, with results from time zero, 3 months and 1 year listed. As is shown, the percent main peak purity, as measured by Reversed-Phase and Cation-Exchange HPLC, does not appear to decrease with time. The minor differences in main-peak purity over time are typical of the normal variation in resolution of the chromatographic columns and are also observed in the frozen standard. The percent aggregation is consistent and does not appear to grow after one year.

TABLE 45

| | Timepoint | | |
|---|---|---|---|
| Concentration | 0 | 3 months | 1 Year |

Reversed-Phase HPLC Percent Main Peak

| | | | |
|---|---|---|---|
| 0.3 | 81.0 | 82.5 | 82.4 |
| 0.5 | 69.0 | 82.7 | 83.4 |
| 1.0 | 80.6 | 82.4 | 83.2 |
| Frozen Starting Material | 82.4 | 84.0 | 84.5 |

Cation-Exchange HPLC Percent Main Peak

| | | | |
|---|---|---|---|
| 0.3 | 67.0 | 71.8 | 81.8 |
| 0.5 | 73.5 | 83.1 | 80.0 |
| 1.0 | 74.2 | 79.7 | 80.5 |
| Frozen Starting Material | 75.3 | 77.0 | 83.6 |

Size-Exclusion HPLC Percent Aggregation

| | | | |
|---|---|---|---|
| 0.3 | <0.1 | 0.1 | 0.1 |
| 0.5 | <0.1 | <0.1 | 0.1 |
| 1.0 | <0.1 | <0.1 | <0.1 |
| Frozen Starting Material | 0.1 | 0.1 | <0.1 |

[0399] Fc-TMP is formulated in 10 mM Histidine, buffered at pH 5.0 with 2% sucrose, 4% mannitol and 0.004% Tween-20. It has been shown that pH 5 is more optimal for stability, and that the sucrose:mannitol ratio is critical in minimizing chemical degradation upon storage at elevated temperature for this protein system. Tween-20 is needed at a low concentration in order to minimize the amount of aggregation which occurs as a result of the lyophilization-process. Stability studies for scale-up applications support these conclusions. Statistical studies have also been designed which validate the level of each excipient in the formulation, including the need for the protein concentration to be at 0.5 mg/ml. Refrigerated temperature stability of the recommended formulation does not show meaningful degradation after storage for one year at 4° C.

### Example 8

### Lyophilized Fc-Ang-2 Binding Peptide

[0400] In order to determine the optimal formulation for lyophilized Fc-Ang-2 binding peptide, analyses were carried out that assessed Fc-Ang-2 binding peptide aggregation and stability at various pH values, excipient concentrations, and protein concentrations.

[0401] Fc-Ang-2 binding peptide consists of two pharmaceutically active polypeptide molecules linked to the C-terminus of the Fc portion of an IgG1 antibody molecule. The molecule is comprised of 574 amino acid residues with a total molecular weight of 63,511 Daltons. The pI of the molecule is 5.45. There are two disulfide bonds on each of the active polypeptides. There are a total of 20 cysteine residues throughout the molecule, most of which are oxidized in disulfide bridges. The sequence of Fc-Ang-2 binding peptide is as follows:

(SEQ ID NO: 2)

MDKTHTCPPCPAPELLGGPSVFLFPPKPKDTLMISRTPEVTCVVVDVSHE
DPEVKFNWYVDGVEVHNAKTKPREEQYNSTYRVVSVLTVLHQDWLNGKEY
KCKVSNKALPAPIEKTISKAKGQPREPQVYTLPPSRDELTKNQVSLTCLV
KGFYPSDIAVEWESNGQPENNYKTTPPVLDSDGSFFLYSKLTVDKSRWQQ
GNVFSCSVMHEALHNHYTQKSLSLSPGKGGGGGAQQEECEWDPWTCEHMG
SGSATGGSGSTASSGSGSATHQEECEWDPWTCEHMLE

[0402] The Fc portion of the IgG1 terminates at K228. G229-G233 composes a linker sequence. The active polypeptide begins at A234 and extends to the rest of the sequence.

[0403] Lyophilized Fc-Ang-2 Binding Peptide pH Screen

[0404] The pH screen tested the stability of an Fc-Ang-2 binding peptide at pH 4.0, 7.0, and 8.0. At pH 4.0, the screened buffers included glutamic acid, sodium citrate, and sodium succinate, each at a concentration of 10 mM. At pH 7.0, the screened buffers were histidine and tris, both at 10 mM concentration. Hisitidine and Tris were also screened at pH 8.0, each at 10 mM. Each of the buffers contained 4% mannitol as a lyophilization caking agent and 2% sucrose as an excipient. In addition, the histidine buffer at pH 7.0 was examined with and without the presence of a surfactant, 0.01% Tween 20 (w/w). The protein was diluted to 5 mg/ml with each of the formulation buffers. This solution was then dialyzed into each of the formulation buffers using dialysis tubing with a 10,000 Da molecular weight exclusion limit, where a total of 6 exchanges were performed with a minimum of 4 hours of equilibration between exchanges. After dialysis, the protein was aliquoted into 3 cc glass vials with a 1 ml fill volume. These vials were then lyophilized using a lab-scale freeze-drying instrument. After lyophilization, the vials were sealed and stored for incubation at 4° C., 29° C., and 37° C., where individual vials were pulled and analyzed at various points over time, beginning immediately after lyophilization and extending out to a period of 24 months. The samples were reconstituted with the appropriate volume of water and analyzed for protein stability using size exclusion liquid chromatography and gel electrophoresis (which detect aggregation, dimerization and proteolytic cleavage), anion exchange liquid chromatography (which detects oxidation). In addition, the properties of the cake such as reconstitution times and moisture and properties of the reconstituted liquid solution were analyzed (such as pH).

[0405] Lyophilized Fc-Ang-2 Binding Peptide Excipient Study

[0406] The excipient screen was performed in a single buffer, 10 mM hisitidine at pH 7.0. The two excipients compared in this study were 0.85% arginine and 1% sucrose. The caking agent used with arginine was 4% mannitol, and the caking agent used with sucrose was 2% glycine. Each of the formulations was tested at protein concentrations of 1 mg/ml, 30 mg/ml, and 60 mg/ml. In addition, one formulation containing a manntiol sucrose combination was tested at 30 mg/ml. Each of the formulations contained 0.01% Tween 20. The protein was first concentrated to 70 mg/ml and dialyzed into the appropriate formulation using a lab-scale ultrafiltration/diafiltration device. The protein was then diluted to each of the three concentrations with the appropriate formulation buffer. The protein was then aliquoted into 3 cc glass vials with a fill volume of 1 ml. The vials were then lyophilized using a lab-scale freeze-drying instrument. After lyophilization, the vials were sealed and stored for incubation at 4° C., 29° C., 37° C., and 52° C., where individual vials were pulled and analyzed at various points over time, beginning immediately after lyophilization and extending out to a period of 24 months. The samples were analyzed for protein stability using size exclusion chromatography, anion exchange chromatography and SDS-PAGE. The properties of the lyophilized cake and reconstituted liquid solutions were also analyzed.

[0407] Lyophilized Fc-Ang-2 Binding Peptide Concentration Screen

[0408] The concentration screen was performed in 10 mM histidine at pH 7.2, with 4% mannitol as the caking agent and 2% sucrose as an excipient. The protein was concentrated to approximately 140 mg/ml and dialyzed into the formulation using a lab-scale ultrafiltration/diafiltration device. The dialyzed protein was then diluted to 30 mg/ml, 60 mg/ml, and 120 mg/ml in the formulation buffer. The solutions were then aliquoted into 3 cc glass vials at a fill volume of 1 ml. The vials were lyophilized using a lab-scale freeze-drying instrument. After lyophilization, the vials were sealed and stored for incubation at 4° C., 29° C., 37° C., and 52° C., where individual vials were pulled and analyzed at various points over time, beginning immediately after lyophilization and extending out to a period of 24 months. The samples were analyzed for protein stability using size exclusion chromatography, anion exchange chromatography and SDS-PAGE. The properties of the lyophilized cake and reconstituted liquid solutions were also analyzed.

### Conclusion

[0409] Considering the above, the optimal formulation(s) comprises 10 mM histidine, 4% mannitol, 2% sucrose, 0.01% Tween-20, pH 7.0.

### Example 9

### Lyophilized Fc-Agp-3 Binding Peptide

[0410] In order to determine the optimal formulation for lyophilized Fc-Agp-3 binding peptide, analyses were carried out that assessed Fc-Agp-3 binding peptide aggregation and stability at various pH values, excipient concentrations, and protein concentrations.

[0411] Fc-Agp-3 binding peptide is a N-linked peptibody against the B cell activation factor (BAFF) aimed against B cell-related diseases. The peptibody is constructed of two non-glycosylated disulfide-linked polypeptides with a total mass of ˜63.6 kD. The isoelectric point for this peptibody has been estimated to be pH 7.36.

[0412] Fc SEQUENCE (SEQ ID NO: 1696):

V D K T H T C P P C P A P E L L G G P S V F L F P
P K P K D T L M I S R T P E V T C V V V D V S H E
D P E V K F N W Y V D G V E V H N A K T K P R E E
Q Y N S T Y R V V S V L T V L H Q D W L N G K E Y
K C K V S N K A L P A P I E K T I S K A K G Q P R
E P Q V Y T L P P S R D E L T K N Q V S L T C L V
K G F Y P S D I A V E W E S N G Q P E N N Y K T T
P P V L D S D G S F F L Y S K L T V D K S R W Q Q
G N V F S C S V M H E A L H N H Y T Q K S L S L S
P G K

[0413] Agp-3 Binding Peptide Sequence (SEQ ID NO: 1697):

G C K W D L L I K Q W V C D P L G S G S A T G G S
G S T A S S G S G S A T H M L P G C K W D L L I K
Q W V C D P L G G G G G

[0414] Thus, the sequence of Fc-Agp-3 binding peptide binding peptide is as follows:

(SEQ ID NO: 1698)

G C K W D L L I K Q W V C D P L G S G S A T G G S
G S T A S S G S G S A T H M L P G C K W D L L I K
Q W V C D P L G G G G G V D K T H T C P P C P A P
E L L G G P S V F L F P P K P K D T L M I S R T P
E V T C V V V D V S H E D P E V K F N W Y V D G V
E V H N A K T K P R E E Q Y N S T Y R V V S V L T
V L H Q D W L N G K E Y K C K V S N K A L P A P I
E K T I S K A K G Q P R E P Q V Y T L P P S R D E
L T K N Q V S L T C L V K G F Y P S D I A V E W E
S N G Q P E N N Y K T T P P V L D S D G S F F L Y
S K L T V D K S R W Q Q G N V F S C S V M H E A L
H N H Y T Q K S L S L S P G K

[0415] Lyophilized Fc-Agp-3 Binding Peptide Broad pH Screen at 10 mg/ml

[0416] The stability was assessed primarily by size-exclusion HPLC (SE-HPLC), which was stability-indicating at elevated temperatures. To assess the stability and reconstitution properties of lyophilized Fc-Agp-3 binding peptide over the pH range of 3.85-7.6, 10 mg/mL Fc-Agp-3 binding peptide was formulated in various 10 mM buffers in the presence of 2.5% mannitol and 2.0% sucrose. The following buffers were tested at approximately 0.5 pH unit increments: acetate, succinate, histidine, pyrophosphate, phosphate and Tris.

[0417] For the formulation development work, purified bulk material was obtained in the 30 mg/mL frozen liquid formulation. The material was dialyzed into the appropriate formulation buffers and lyophilized in a Virtis lyophilizer using a conservative cycle. The annealing step was performed at −20° C. and lasted for 4 hours to allow for mannitol crystallization. The primary drying was performed at the shelf temperature of −25° C. for 20 hours. The primary drying reached completion at −25° C. since no spike in the vacuum was observed as the shelf temperature was increased up to 0° C. No major collapse was observed and the samples proceeded successfully through the secondary drying first at 0° C., and then at 25° C. Upon reconstitution the formulations with pH at or above 7 were slightly turbid, while all the other formulations were clear. This was explained by the proximity of the high pH formulations to the isoelectric point of Fc-Agp-3 binding peptide (pI=7.36). SE-HPLC analysis revealed a dimer as the main high molecular weight specie. It was observed that relative % dimer was strongly pH dependent with the lowest accumulation at pH 5 and below. The amount of soluble aggregates also showed some pH dependence. No soluble aggregates were observed in the samples prior to lyophilization. In contrast, a small amount of dimer was present in all formulations prior to lyophilization, and it increased further in the reconstituted samples, post lyophilization. No significant clipping was observed in all formulations. The highest amount of the intact monomer was in the case of acetate, succinate and histidine formulations at pH 5 and below.

[0418] Lyophilized Fc-Agp-3 Binding Peptide Broad pH Screen at 30 mg/ml: Stabilizing Effect of Sucrose and Mannitol

[0419] The stability was assessed primarily by size-exclusion HPLC (SE-HPLC), which was stability-indicating. To evaluate the effect of the presence of 2.5% mannitol and 3.5% sucrose on stability and reconstitution properties of lyophilized Fc-Agp-3 binding peptide over the pH range of 4.5-7.5, Fc-Agp-3 binding peptide was formulated at 30 mg/mL in 10 mM succinate, histidine and phosphate buffers. Pyrophosphate and Tris buffers were excluded from this study due to poor performance in the previous broad pH screen. Acetate buffer was excluded due to possibility of pH changes in the reconstituted samples as a result of acetate sublimation during freeze-drying.

[0420] For the formulation development work, purified bulk material was obtained in the 30 mg/mL frozen liquid formulation. The material was dialyzed into the appropriate formulation buffers and lyophilized in a Virtis lyophilizer using a conservative cycle. The annealing step was performed at −20° C. and lasted for 5 hours to allow for more complete mannitol crystallization. The primary drying was performed at the shelf temperature of −25° C. for 20 hours. The primary drying not quite reached completion at −25° C., and some spike in the vacuum was observed as the shelf temperature was increased up to 0° C. No major collapse was observed and the samples proceeded successfully through the secondary drying first at 0° C., and then at 25° C. Upon reconstitution formulations with pH around 7 were slightly turbid, while all other formulations were clear. As it was mentioned previously, this could be explained by the proximity of the high pH formulations to the isoelectric point of Fc-Agp-3 binding peptide. SE-HPLC analysis revealed dimer as the main high molecular weight specie. Again, it was observed that relative % dimer was strongly pH dependent with the lowest accumulation at pH 5 and below. The amount of soluble aggregates did not show clear pH dependence. No soluble aggregates were observed in the samples prior to lyophilization. ˜0.6% dimer was observed in the non-GMP bulk prior to formulating and it increased up to 3.0% for high pH formulations prior to lyophilization as a result of buffer exchange/concentration.

[0421] The pH dependence of the dimer accumulation was also confirmed by close correspondence of the relative amount dimer at a given pH irrespective of the type of buffer. % dimer did not increase significantly post-lyophilization as evidenced by T=0 samples. The only exception were the samples non-containing both, sucrose and mannitol, which showed noticeable, ˜0.25-0.5% increase in % dimer. In the presence of sucrose the main peak loss was minimal even after buffer exchange/lyophilization for succinate and histidine formulations with pH 4.1 and 4.7, respectively. Compared to them, all phosphate formulations showed 3% loss of the main peak prior to lyophilization. Although, the cake was formed even in the absence of both sucrose and mannitol, the corresponding main peak dropped by 0.5-0.7% compared to the sugar-containing formulations. In addition, reconstitution of the non-sugar formulations was much longer (>2 min) and required some agitation. In order to ensure robustness of the cake mannitol or glycine were included as bulking agents in all subsequent formulations even though sucrose alone was shown to confer sufficient protein stability.

[0422] Lyophilized Fc-Agp-3 Binding Peptide Narrow pH Screen at 30 mg/ml

[0423] The stability was assessed primarily by size-exclusion HPLC (SE-HPLC) and reversed-phase HPLC (RP-HPLC), which were stability-indicating at elevated temperatures. Since % recovery of the main peak was higher at pH 5 and below, the phosphate buffer was omitted from the narrow pH screen. In addition to the succinate and histidine buffers, which performed well in the broad pH screens, the narrow pH screen included 10 mM glutamate, pH 4-6. The formulations were tested at 0.2 pH unit increments. The sucrose and mannitol content was kept constant at 3.5% and 2.5%, respectively, except for two succinate formulations at pH 4.5 with 2.0% and 5.0% sucrose. Also, six potential generic lyo formulations were tested at every pH unit increments, such as:

[0424] 1) 20 mM histidine, 2.0% glycine, 1.0% sucrose at pH 5.0

[0425] 2) 20 mM histidine, 2.0% glycine, 1.0% sucrose at pH 6.0

[0426] 3) 20 mM histidine, 2.0% glycine, 1.0% sucrose at pH 7.0

[0427] 4) 20 mM histidine, 4.0% mannitol, 2.0% sucrose at pH 5.0

[0428] 5) 20 mM histidine, 4.0% mannitol, 2.0% sucrose at pH 6.0

[0429] 6) 20 mM histidine, 4.0% mannitol, 2.0% sucrose at pH 7.0

[0430] For the formulation development work, purified bulk material was obtained in the 30 mg/mL frozen liquid formulation. The material was dialyzed into the appropriate formulation buffers and lyophilized in a Virtis lyophilizer using a conservative cycle. The lyophilization cycle was further modified. The annealing step was performed at −15° C. to allow for glycine crystallization and lasted for 5 hours. The primary drying was performed initially at −30° C. for a short period of time (4 h). Then the shelf temperature was raised to −25° C. and kept constant for 24 hours. However, primary drying did not quite reach completion at −25° C. as evidenced by a small spike in the vacuum as the shelf temperature was further increased up to 0° C. Nevertheless, no major collapse was observed and the samples proceeded successfully through the secondary drying first at 0° C., and then at 25° C. Up to 6 months lyophilized state stability data was generated at 37° C. to assess long-term stability of Fc-Agp-3 binding peptide. Increase in pH results in the loss of the main peak for all histidine formulations. Only generic formulations were monitored up to 6 months, but the advantage of the pH near 5.0 was already obvious for the 1- and 3-month timepoints. Moreover, 6-month data for the generic formulations suggests that mannitol+sucrose formulations are more stable than glycine+sucrose, especially at pH 6 and higher.

[0431] In the case of glutamate and succinate formulations there was also a clear pH-dependent increase in the amount of dimer, the main degradation product, as pH becomes less acidic. Similar pH dependence is seen for the aggregates. The highest recovery of the main peak was observed for pH 5 and below. Initial loss of the main peak for T=0 can be explained by protein degradation during buffer exchange and concentrating as evidenced by a similar loss for the formulations prior to lyophilization. However, 3-month stability data suggest that glutamate formulations had higher physical stability than their succinate counterparts (with the same pH). It has to be noted that in this study we also tested effect of increased sucrose concentrations on the stability of succinate formulations. In addition to 3.5% sucrose, we compared 2.0% and 5.0% sucrose formulations in succinate, pH 4.5. The increase in sucrose decreased high molecular weight species to some extent, but it did not significantly affect the amount of the main peak. Therefore, 3.5% sucrose was considered optimal since such formulations most closely matched with physiological tonicity.

[0432] One of clip specie was observed growing at low pH by RP-HPLC. A significant portion of the pH-dependent clipping in the lyophilized formulations occurred prior to lyophilization as a result of time-consuming buffer exchange and protein concentrating steps. After lyophilization no significant increase in the amount of clips was observed even after 3- to 6-month storage at 37° C. In general the data suggests using higher pH formulations to mitigate the clipping since it is unobservable at pH 6 and above. However, the amount of the dimer is significant at higher pH and may be as high as 2.5-4.5% at pH 6 and above. Therefore, a compromise can be found in formulating Fc-Agp-3 binding peptide at pH 5, where clipping is moderate, especially in the glutarnate and histidine buffers, and when the dimer formation is still sufficiently suppressed.

### Conclusion

[0433] 2.5% mannitol and 3.5% sucrose have provided sufficient cake and protein stability as confirmed by 6-month shelf study at 37° C. Therefore, 10 mM histidine, 2.5% mannitol, 3.5% sucrose at pH 5.0 and 10 mM glutamate, 2.5% mannitol, 3.5% sucrose at pH 5.0 can be used for formulating 30 mg/mL Fc-Agp-3 binding peptide. In addition, this study shows that 20 mM histidine, 4.0% mannitol, 2.0% sucrose at pH 5.0 also performs well and can be considered as a possible generic lyo formulation for peptibodies.

### Example 10

### Lyophilized Fc-Myo Binding Peptide

[0434] In order to determine the optimal formulation for lyophilized Fc-Myo binding peptide, analyses were carried out that assessed Fc-Myo binding peptide aggregation and stability at various pH values, excipient concentrations, and protein concentrations.

[0435] Fc-Myo binding peptide is a C-linked peptibody against the myostatin protein aimed against muscle wasting-related diseases. The peptibody is constructed of two non-glycosylated disulfide-linked polypeptides with a total mass of ˜59.1 kD. The isoelectric point for this peptibody has been estimated to be pH 6.88.

[0436] Fc Sequence (SEQ ID NO:1699):

M D K T H T C P P C P A P E L L G G P S V F L F P
P K P K D T L M I S R T P E V T C V V V D V S H E
D P E V K F N W Y V D G V E V H N A K T K P R E E
Q Y N S T Y R V V S V L T V L H Q D W L N G K E Y
K C K V S N K A L P A P I E K T I S K A K G Q P R
E P Q V Y T L P P S R D E L T K N Q V S L T C L V
K G F Y P S D I A V E W E S N G Q P E N N Y K T T
P P V L D S D G S F F L Y S K L T V D K S R W Q Q
G N V F S C S V M H E A L H N H Y T Q K S L S L S
P G K

[0437] Myostatin Binding Peptide Sequence (SEQ ID NO:1700):

G G G G G A Q L A D H G Q C I R W P W M C P P E G
W E

[0438] Thus, the sequence of Fc-Myo binding peptide binding peptide is as follows:

(SEQ ID NO: 1701)

M D K T H T C P P C P A P E L L G G P S V F L F P
P K P K D T L M I S R T P E V T C V V V D V S H E
D P E V K F N W Y V D G V E V H N A K T K P R E E
Q Y N S T Y R V V S V L T V L H Q D W L N G K E Y
K C K V S N K A L P A P I E K T I S K A K G Q P R
E P Q V Y T L P P S R D E L T K N Q V S L T C L V
K G F Y P S D I A V E W E S N G Q P E N N Y K T T
P P V L D S D G S F F L Y S K L T V D K S R W Q Q
G N V F S C S V M H E A L H N H Y T Q K S L S L S
P G K G G G G G A Q L A D H G Q C I R W P W M C P
P E G W E

[0439] Determination of pH Condition for Lyophilized Fc-Myo Binding Peptide

[0440] The stability was assessed primarily by size-exclusion HPLC (SE-HPLC), which was stability-indicating at elevated temperatures. A pH screen study was designed and performed to determine the optimal formulation pH in the liquid state prior to the lyophilization. Protein was formulated in pH 4.5, 4.75, 5.0, 5.5 and 6.0 with buffer agents of acetate and histidine and sucrose as the stabilizer (or lyo protectant). The formulated vials were stored at 29 C for up to 1 year. Stability was monitored using SE-HPLC. The aggregation rate constants were calculated for each of the formulation conditions. The aggregation rate at pH 4.5 was found to be the minimum, therefore pH 4.5 was selected as the preferred formulation pH condition.

[0441] Lyophilized Fc-Myo Binding Peptide Buffer Agent Study at 30 mg/mL.

[0442] The stability was assessed primarily by size-exclusion HPLC (SE-HPLC), which was stability-indicating. A 30 mg/mL dosage form as investigated using three different buffering agent: 10 mM glutamate, 10 mM histidine and 10 mM succinate at pH 4.5. All formulations contain 0.004% polysorbate 20.

For the formulation development work, purified bulk material was obtained in the 30 mg/mL frozen liquid formulation. The material was dialyzed into the appropriate formulation buffers and lyophilized in a Virtis lyophilizer using a conservative cycle. Lyophilized protein formulation displayed acceptable cake elegance. Upon reconstitution formulations were clear Lyophilized Fc-Myo binding peptide was stored at 4, 29, 37 and 52° C. The real time stability studies were carried out at 4° C. and found to be comparable for these formulations for up to 3 months. However at 52° C. storage 3 months, the histidine containing formulation was slightly better than the glutamate containing formulation. The succinate containing formulation was significantly less stable than the other two formulations. Based on these results, histidine and glutamate were considered as the preferred buffer agents for the final Fc-Myo binding peptide formulation.

[0443] Lyophilized Fc-Myo Binding Peptide Excipient Study at 30 mg/ml: Stabilizing Effect of Sucrose, Trehalose and Hydroxyethyl Starch

[0444] The stability was assessed primarily by size-exclusion HPLC (SE-HPLC), which was stability-indicating. To evaluate the effect of the presence of trehalose, hydroxyethyl starch and sucrose on stability of lyophilized Fc-Myo binding peptide, Fc-Myo binding peptide was formulated at 30 mg/mL in 10 mM glutamate buffer with 4% mannitol. The concentration of trehalose and sucrose used was 2.0%, 1% hydroxyethyl starch was added to the sucrose formulation to make a final formulation of 10 mM glutamate, 4% mannitol, 2% sucrose, 1% hydroxyethyl starch. All formulations contain 0.004% polysorbate 20.

[0445] For the formulation development work, purified bulk material was obtained in the 30 mg/mL frozen liquid formulation. The material was dialyzed into the appropriate formulation buffers and lyophilized in a Virtis lyophilizer using a conservative cycle. Lyophilized protein formulation displayed acceptable cake elegance. Upon reconstitution formulations were clear.

[0446] The stability of these formulations was monitored using SE-HPLC.

[0447] Lyophilized Fc-Myo binding peptide was stored at 4, 29, 37 and 52° C. The real time shelf time condition stability (4° C.) was found comparable between these formulations for up to 3 months. However under 52° C. storage condition for 3 months, the sucrose containing formulation was slightly better than the trehalose containing formulation. Addition of hydroxyethyl starch did not display any negative impact on the stability. Based on these results, sucrose was considered as the preferred stabilizer for the final Fc-Myo binding peptide formulation.

[0448] Lyophilized Fc-Myo binding Peptide Excipient Study at 30 mg/ml: Stabilizing Effect of Sucrose and Mannitol

[0449] The stability was assessed primarily by size-exclusion HPLC (SE-HPLC), which was stability-indicating. To evaluate the effect of the presence of variable amount of mannitol and sucrose on stability and reconstitution properties of lyophilized Fc-Myo binding peptide over the mannitol range of 4.0 to 8% and the sucrose range of 1.0% to 4.0%, Fc-Myo binding peptide was formulated at 30 mg/mL in 10 mM glutamate buffer. All formulations contain 0.004% polysorbate 20.

[0450] For the formulation development work, purified bulk material was obtained in the 30 mg/mL frozen liquid formulation. The material was dialyzed into the appropriate formulation buffers and lyophilized in a Virtis lyophilizer using a conservative cycle. Lyophilized protein formulation displayed acceptable cake elegance. Upon reconstitution formulations were clear.

[0451] The stability of these formulations was monitored using SE-HPLC method. Lyophilized Fc-Myo binding peptide was stored at 4, 29, 37 and 52° C. The real time shelf time condition stability (4° C.) was found comparable between these formulations for up to 3 months. However when stored at 52° C. for 3 months, an increasing amount of sucrose was found contributing to the increase in stability against aggregation. Due to a concern to maintain the isotonic condition for the final formulation which limits the total amount of disaccharides and to maintain a proper ratio of mannitol and sucrose to preserve the lyophilized cake property, 4.0% mannitol and 2.0% sucrose were the preferred excipients for the final formulation.

[0452] Lyophilized Fc-Myo Binding Peptide Excipient Study at 1, 30, 85 mg/mL

[0453] The stability was assessed primarily by size-exclusion HPLC (SE-HPLC), which was stability-indicating. To evaluate the effect of the protein concentration on stability and reconstitution properties of lyophilized Fc-Myo binding peptide, Fc-Myo binding peptide was formulated at 1, 30, 85 mg/mL in 10 mM glutamate buffer with 4% mannitol and 2% sucrose. All formulations contain 0.004% polysorbate 20.

[0454] For the formulation development work, purified bulk material was obtained in the 30 mg/mL frozen liquid formulation. The material was buffer exchanged into the appropriate formulation buffers using UF/DF and lyophilized in a Virtis lyophilizer using a conservative cycle. Lyophilized protein formulation displayed acceptable cake elegance. Upon reconstitution formulations were clear.

[0455] The stability of these formulations was monitored using SE-HPLC method. Lyophilized Fc-Myo binding peptide was stored at 4, 29, 37° C. The real time shelf time condition stability (4° C.) was found comparable between these formulations for up to 6 months. The stability is likely acceptable for all the concentrations studied as the commercial product formulation.

### CONCLUSION

[0456] 4.0% mannitol and 2.0% sucrose have provided sufficient cake and protein stability as confirmed by 12-month shelf study at 4° C. Therefore, 10 mM histidine, 4.0% mannitol, 2.0% sucrose at pH 4.5 and 10 mM glutamate, 4.0% mannitol, 2.0% sucrose at pH 4.5 can be used for formulating 1 to 100 mg/mL Fc-Myo binding peptide.

[0457] The present invention has been described in terms of particular embodiments found or proposed to comprise preferred modes for the practice of then invention. It will be appreciated by those of ordinary skill in the art that, in light of the present disclosure, numerous modifications and changes can be made in the particular embodiments exemplified without departing from the intended scope of the invention.

The application's sequence listing, which the Patent Office published only in electronic form, follows.

SEQUENCE LISTING (1701 sequences)

SEQ ID NO: 1 - protein, 227 aa, Artificial sequence
  Synthetic peptide
DKTHTCPPCPAPELLGGPSVFLFPPKPKDTLMISRTPEVTCVVVDVSHEDPEVKFNWYVDGVEVHNAKTKPREEQYNSTYRVVSVLTVLHQDWLNGKEYKCKVSNKALPAPIEKTISKAKGQPREPQVYTLPPSRDELTKNQVSLTCLVKGFYPSDIAVEWESNGQPENNYKTTPPVLDSDGSFFLYSKLTVDKSRWQQGNVFSCSVMHEALHNHYTQKSLSLSPGK

SEQ ID NO: 2 - protein, 287 aa, Artificial sequence
  Synthetic peptide
MDKTHTCPPCPAPELLGGPSVFLFPPKPKDTLMISRTPEVTCVVVDVSHEDPEVKFNWYVDGVEVHNAKTKPREEQYNSTYRVVSVLTVLHQDWLNGKEYKCKVSNKALPAPIEKTISKAKGQPREPQVYTLPPSRDELTKNQVSLTCLVKGFYPSDIAVEWESNGQPENNYKTTPPVLDSDGSFFLYSKLTVDKSRWQQGNVFSCSVMHEALHNHYTQKSLSLSPGKGGGGGAQQEECEWDPWTCEHMGSGSATGGSGSTASSGSGSATHQEECEWDPWTCEHMLE

SEQ ID NO: 3 - protein, 9 aa, Artificial sequence
  Synthetic peptide
  Misc feature (1)..(1): Xaa=Val, Leu, Ile, Glu, Pro, Gly, Tyr, Met, Thr or Asp
  Misc feature (2)..(2): Xaa=Tyr, Trp or Phe
  Misc feature (3)..(3): Xaa=Glu, Phe, Val, Trp or Tyr
  Misc feature (4)..(5): If residue 5 is not Pro, azetidine is between residues 4 and 5
  Misc feature (5)..(5): Xaa=Pro or nothing
  Misc feature (7)..(7): Xaa=Ser, Ala, Val or Leu
  Misc feature (8)..(8): Xaa=Met, Phe, Val, Arg, Gln, Lys, Thr, Ser, Asp, Leu, Ile or Glu
  Misc feature (9)..(9): Xaa=Glu, Leu, Trp, Val, His, Ile, Gly, Ala, Asp, Leu, Tyr, Asn, Gln or Pro
XXXQXYXXX

SEQ ID NO: 4 - protein, 8 aa, Artificial sequence
  Synthetic peptide
  Misc feature (1)..(2): Xaa can be any naturally occurring amino acid
  Misc feature (3)..(4): If residue 4 is not Pro, azetidine is between residues 3 and 4
  Misc feature (4)..(4): Xaa=Pro or nothing
  Misc feature (6)..(6): Xaa=Ser, Ala, Val or Leu
  Misc feature (7)..(8): Xaa can be any naturally occurring amino acid
XXQXYXXX

SEQ ID NO: 5 - protein, 8 aa, Artificial sequence
  Synthetic peptide
  Misc feature (1)..(1): Xaa=Tyr, Trp or Phe
  Misc feature (2)..(2): Xaa can be any naturally occurring amino acid
  Misc feature (3)..(4): If residue 4 is not Pro, azetidine is between residues 3 and 4
  Misc feature (4)..(4): Xaa=Pro or nothing
  Misc feature (6)..(6): Xaa=Ser, Ala, Val or Leu
  Misc feature (7)..(8): Xaa can be any naturally occurring amino acid
XXQXYXXX

SEQ ID NO: 6 - protein, 8 aa, Artificial sequence
  Synthetic peptide
  Misc feature (1)..(1): Xaa=Tyr, Trp or Phe
  Misc feature (2)..(2): Xaa=Glu, Phe, Val, Trp or Tyr
  Misc feature (3)..(4): If residue 4 is not Pro, azetidine is between residues 3 and 4
  Misc feature (4)..(4): Xaa=Pro or nothing
  Misc feature (6)..(6): Xaa=Ser, Ala, Val or Leu
  Misc feature (7)..(7): Xaa=Met, Phe, Val, Arg, Gln, Lys, Thr, Ser, Asp, Leu, Ile or Glu
  Misc feature (8)..(8): Xaa=Glu, Leu, Trp, Val, His, Ile, Gly, Ala, Asp, Leu, Tyr, Asn, Gln or Pro
XXQXYXXX

SEQ ID NO: 7 - protein, 9 aa, Artificial sequence
  Synthetic peptide
  Misc feature (1)..(1): Xaa=Val, Leu, Ile, Glu, Pro, Gly, Tyr, Met, Thr or Asp
  Misc feature (2)..(2): Xaa=Tyr, Trp or Phe
  Misc feature (3)..(3): Xaa=Glu, Phe, Val, Trp or Tyr
  Misc feature (4)..(5): If residue 5 is not Pro, azetidine is between residues 4 and 5
  Misc feature (5)..(5): Xaa=Pro or nothing
  Misc feature (7)..(7): Xaa=Ser, Ala, Val or Leu
  Misc feature (8)..(8): Xaa=Met, Phe, Val, Arg, Gln, Lys, Thr, Ser, Asp, Leu, Ile or Glu
  Misc feature (9)..(9): Xaa=Glu, Leu, Trp, Val, His, Ile, Gly, Ala, Asp, Leu, Tyr, Asn, Gln or Pro
XXXQXYXXX

SEQ ID NO: 8 - protein, 21 aa, Artificial sequence
  Synthetic peptide
  Misc feature (1)..(1): Xaa=Ala, Asp, Glu, Phe, Gly, Lys, Gln, Ser, Thr or Tyr
  Misc feature (2)..(2): Xaa=Ala, Asp, Gly, Ile, Asn, Pro, Ser, Thr, Val or Trp
  Misc feature (3)..(3): Xaa=Ala, Asp, Gly, Leu, Asn, Pro, Ser, Thr, Trp or Tyr
  Misc feature (4)..(4): Xaa=Ala, Asp, Glu, Phe, Leu, Asn, Arg, Val or Tyr
  Misc feature (5)..(5): Xaa=Ala, Asp, Glu, Gln, Arg, Ser or Thr
  Misc feature (6)..(6): Xaa=His, Ile, Leu, Pro, Ser, Thr or Trp
  Misc feature (7)..(7): Xaa=Ala, Glu, Phe, Lys, Asn, Gln, Arg, Ser or Tyr
  Misc feature (8)..(8): Xaa=Asp, Glu, Phe, Gln, Arg, Thr or Trp
  Misc feature (9)..(9): Xaa=Ala, Asp, Pro, Ser, Thr or Trp
  Misc feature (10)..(10): Xaa=Ala, Asp, Gly, Lys, Asn, Gln, Ser or Thr
  Misc feature (11)..(11): Xaa=Ala, Glu, Leu, Pro, Ser, Thr, Val or Tyr
  Misc feature (12)..(12): Xaa=Val, Leu, Ile, Glu, Pro, Gly, Tyr, Met, Thr or Asp
  Misc feature (13)..(13): Xaa=Tyr, Trp or Phe
  Misc feature (14)..(14): Xaa=Glu, Phe, Val, Trp or Tyr
  Misc feature (15)..(16): If residue 16 is not Pro, azetidine is between residues 15 and 16
  Misc feature (16)..(16): Xaa=Pro or nothing
  Misc feature (18)..(18): Xaa=Ser, Ala, Val or Leu
  Misc feature (19)..(19): Xaa=Met, Phe, Val, Arg, Gln, Lys, Thr, Ser, Asp, Leu, Ile or Glu
  Misc feature (20)..(20): Xaa=Glu, Leu, Trp, Val, His, Ile, Gly, Ala, Asp, Leu, Tyr, Asn, Gln or Pro
XXXXXXXXXXXXXXQXYXXXL

SEQ ID NO: 9 - protein, 11 aa, Artificial sequence
  Synthetic peptide
  Misc feature (1)..(1): Xaa=Asp or Tyr
  Misc feature (3)..(3): Xaa=Asp, Ser or Thr
  Misc feature (4)..(4): Xaa=Ser, Thr or Ala
  Misc feature (5)..(5): Xaa=Ser or Trp
  Misc feature (6)..(6): Xaa=Ser or Tyr
  Misc feature (7)..(7): Xaa=Asp, Gln, Glu or Val
  Misc feature (8)..(8): Xaa=Asn, Ser, Lys, His or Trp
  Misc feature (9)..(9): Xaa=Phe or Leu
  Misc feature (10)..(10): Xaa=Asp, Asn, Ser or Leu
  Misc feature (11)..(11): Xaa=Leu, Ile, Gln, Met or Ala
XNXXXXXXXXX

SEQ ID NO: 10 - protein, 21 aa, Artificial sequence
  Synthetic peptide
TANVSSFEWTPYYWQPYALPL

SEQ ID NO: 11 - protein, 18 aa, Artificial sequence
  Synthetic peptide
SWTDYGYWQPYALPISGL

SEQ ID NO: 12 - protein, 21 aa, Artificial sequence
  Synthetic peptide
ETPFTWEESNAYYWQPYALPL

SEQ ID NO: 13 - protein, 21 aa, Artificial sequence
  Synthetic peptide
ENTYSPNWADSMYWQPYALPL

SEQ ID NO: 14 - protein, 21 aa, Artificial sequence
  Synthetic peptide
SVGEDHNFWTSEYWQPYALPL

SEQ ID NO: 15 - protein, 21 aa, Artificial sequence
  Synthetic peptide
DGYDRWRQSGERYWQPYALPL

SEQ ID NO: 16 - protein, 11 aa, Artificial sequence
  Synthetic peptide
FEWTPGYWQPY

SEQ ID NO: 17 - protein, 11 aa, Artificial sequence
  Synthetic peptide
FEWTPGYWQHY

SEQ ID NO: 18 - protein, 10 aa, Artificial sequence
  Synthetic peptide
  Misc feature (9)..(10): Azetidine is between residues 9 and 10
FEWTPGWYQY

SEQ ID NO: 19 - protein, 10 aa, Artificial sequence
  Synthetic peptide
  Acetylation (1)..(1): Acetylated phenylalanine at position 1
  Misc feature (9)..(10): Azetidine is between positions 9 and 10
FEWTPGWYQY

SEQ ID NO: 20 - protein, 11 aa, Artificial sequence
  Synthetic peptide
  Phosphorylation (8)..(8): Phosphorylated Tyr at position 8
  Misc feature (10)..(11): Azetidine is between residues 10 and 11
FEWTPGWYYQY

SEQ ID NO: 21 - protein, 10 aa, Artificial sequence
  Synthetic peptide
  Misc feature (9)..(10): Azetidine is between residues 9 and 10
FAWTPGYWQY

SEQ ID NO: 22 - protein, 10 aa, Artificial sequence
  Synthetic peptide
  Misc feature (9)..(10): Azetidine is between residues 9 and 10
FEWAPGYWQY

SEQ ID NO: 23 - protein, 10 aa, Artificial sequence
  Synthetic peptide
  Misc feature (9)..(10): Azetidine is between residues 9 and 10
FEWVPGYWQY

SEQ ID NO: 24 - protein, 10 aa, Artificial sequence
  Synthetic peptide
  Misc feature (9)..(10): Azetidine is between residues 9 and 10
FEWTPGYWQY

SEQ ID NO: 25 - protein, 10 aa, Artificial sequence
  Synthetic peptide
  Acetylation (1)..(1): Acetylated phenylalanine at position 1
  Misc feature (9)..(10): Azetidine is between residues 9 and 10
FEWTPGYWQY

SEQ ID NO: 26 - protein, 10 aa, Artificial sequence
  Synthetic peptide
  Misc feature (9)..(10): Azetidine is between residues 9 and 10
FEWTPAWYQY

SEQ ID NO: 27 - protein, 10 aa, Artificial sequence
  Synthetic peptide
  Misc feature (6)..(6): Xaa=Sarcosine
  Misc feature (9)..(10): Azetidine is between residues 9 and 10
FEWTPXWYQY

SEQ ID NO: 28 - protein, 11 aa, Artificial sequence
  Synthetic peptide
FEWTPGYYQPY

SEQ ID NO: 29 - protein, 11 aa, Artificial sequence
  Synthetic peptide
FEWTPGWWQPY

SEQ ID NO: 30 - protein, 11 aa, Artificial sequence
  Synthetic peptide
FEWTPNYWQPY

SEQ ID NO: 31 - protein, 10 aa, Artificial sequence
  Synthetic peptide
  Misc feature (9)..(10): Azetidine is between residues 9 and 10
FEWTPVYWQY

SEQ ID NO: 32 - protein, 9 aa, Artificial sequence
  Synthetic peptide
  Misc feature (4)..(5): Pipecolic acid is between residues 4 and 5
  Misc feature (8)..(9): Azetidine is between residues 8 and 9
FEWTGYWQY

SEQ ID NO: 33 - protein, 9 aa, Artificial sequence
  Synthetic peptide
  Misc feature (5)..(6): Aminoisobutyric acid is between residues 5 and 6
  Misc feature (8)..(9): Azetidine is between residues 8 and 9
FEWTPYWQY

SEQ ID NO: 34 - protein, 10 aa, Artificial sequence
  Synthetic peptide
  Misc feature (5)..(5): Xaa=Sarcosine
  Misc feature (9)..(10): Azetidine is between residues 9 and 10
FEWTXGYWQY

SEQ ID NO: 35 - protein, 11 aa, Artificial sequence
  Synthetic peptide
FEWTPGYWQPY

SEQ ID NO: 36 - protein, 11 aa, Artificial sequence
  Synthetic peptide
FEWTPGYWQHY

SEQ ID NO: 37 - protein, 10 aa, Artificial sequence
  Synthetic peptide
  Misc feature (9)..(10): Azetidine is between residues 9 and 10
FEWTPGWYQY

SEQ ID NO: 38 - protein, 10 aa, Artificial sequence
  Synthetic peptide
  Acetylation (1)..(1): Acetylated phenylalanine at position 1
  Misc feature (9)..(10): Azetidine is between residues 9 and 10
FEWTPGWYQY

SEQ ID NO: 39 - protein, 10 aa, Artificial sequence
  Synthetic peptide
  Phosphorylation (8)..(8): Phosphorylated Tyr at position 8
  Misc feature (9)..(10): Azetidine is between residues 9 and 10
FEWTPGWYQY

SEQ ID NO: 40 - protein, 10 aa, Artificial sequence
  Synthetic peptide
  Misc feature (9)..(10): Azetidine is between residues 9 and 10
FAWTPGYWQY

SEQ ID NO: 41 - protein, 10 aa, Artificial sequence
  Synthetic peptide
  Misc feature (9)..(10): Azetidine is between residues 9 and 10
FEWAPGYWQY

SEQ ID NO: 42 - protein, 10 aa, Artificial sequence
  Synthetic peptide
  Misc feature (9)..(10): Azetidine is between residues 9 and 10
FEWVPGYWQY

SEQ ID NO: 43 - protein, 10 aa, Artificial sequence
  Synthetic peptide
  Misc feature (9)..(10): Azetidine is between residues 9 and 10
FEWTPGYWQY

SEQ ID NO: 44 - protein, 10 aa, Artificial sequence
  Synthetic peptide
  Acetylation (1)..(1): Acetylated phenylalanine at position 1
  Misc feature (9)..(10): Azetidine is between residues 9 and 10
FEWTPGYWQY

SEQ ID NO: 45 - protein, 10 aa, Artificial sequence
  Synthetic peptide
  Misc feature (6)..(6): D-Ala
  Misc feature (9)..(10): Azetidine is between residues 9 and 10
FEWTPAWYQY

SEQ ID NO: 46 - protein, 10 aa, Artificial sequence
  Synthetic peptide
  Misc feature (6)..(6): Xaa=Sarcosine
  Misc feature (9)..(10): Azetidine is between residues 9 and 10
FEWTPXWYQY

SEQ ID NO: 47 - protein, 11 aa, Artificial sequence
  Synthetic peptide
FEWTPGYYQPY

SEQ ID NO: 48 - protein, 11 aa, Artificial sequence
  Synthetic peptide
FEWTPGWWQPY

SEQ ID NO: 49 - protein, 11 aa, Artificial sequence
  Synthetic peptide
FEWTPNYWQPY

SEQ ID NO: 50 - protein, 10 aa, Artificial sequence
  Synthetic peptide
  Misc feature (6)..(6): D-Val
  Misc feature (9)..(10): Azetidine is between residues 9 and 10
FEWTPVYWQY

SEQ ID NO: 51 - protein, 9 aa, Artificial sequence
  Synthetic peptide
  Misc feature (4)..(5): Pipecolic acid is between residues 4 and 5
  Misc feature (8)..(9): Azetidine is between residues 8 and 9
FEWTGYWQY

SEQ ID NO: 52 - protein, 9 aa, Artificial sequence
  Synthetic peptide
  Misc feature (5)..(6): Aminoisobutyric acid is between residues 5 and 6
  Misc feature (8)..(9): Azetidine is between residues 8 and 9
FEWTPYWQY

SEQ ID NO: 53 - protein, 10 aa, Artificial sequence
  Synthetic peptide
  Misc feature (5)..(5): Xaa=Sarcosine
  Misc feature (9)..(10): Azetidine is between residues 9 and 10
FEWTXGYWQY

SEQ ID NO: 54 - protein, 15 aa, Artificial sequence
  Synthetic peptide
FEWTPGYWQPYALPL

SEQ ID NO: 55 - protein, 10 aa, Artificial sequence
  Synthetic peptide
  Misc feature (1)..(1): Ala modified to 1-naphthylalanine at position 1
  (9)..(10): Azetidine is between residues 9 and 10
AEWTPGYYQY

SEQ ID NO: 56 - protein, 10 aa, Artificial sequence
  Synthetic peptide
  Misc feature (9)..(10): Azetidine is between residues 9 and 10
YEWTPGYYQY

SEQ ID NO: 57 - protein, 10 aa, Artificial sequence
  Synthetic peptide
  Misc feature (9)..(10): Azetidine is between residues 9 and 10
FEWVPGYYQY

SEQ ID NO: 58 - protein, 10 aa, Artificial sequence
  Synthetic peptide
  Misc feature (6)..(6): D-Ser
  Misc feature (9)..(10): Azetidine is between residues 9 and 10
FEWTPSYYQY

SEQ ID NO: 59 - protein, 10 aa, Artificial sequence
  Synthetic peptide
  Misc feature (6)..(6): D-Asn
  Misc feature (9)..(10): Azetidine is between residues 9 and 10
FEWTPNYYQY

SEQ ID NO: 60 - protein, 4 aa, Artificial sequence
  Synthetic peptide
TKPR

SEQ ID NO: 61 - protein, 5 aa, Artificial sequence
  Synthetic peptide
RKSSK

SEQ ID NO: 62 - protein, 5 aa, Artificial sequence
  Synthetic peptide
RKQDK

SEQ ID NO: 63 - protein, 6 aa, Artificial sequence
  Synthetic peptide
NRKQDK

SEQ ID NO: 64 - protein, 6 aa, Artificial sequence
  Synthetic peptide
RKQDKR

SEQ ID NO: 65 - protein, 9 aa, Artificial sequence
  Synthetic peptide
ENRKQDKRF

SEQ ID NO: 66 - protein, 6 aa, Artificial sequence
  Synthetic peptide
VTKFYF

SEQ ID NO: 67 - protein, 5 aa, Artificial sequence
  Synthetic peptide
VTKFY

SEQ ID NO: 68 - protein, 5 aa, Artificial sequence
  Synthetic peptide
VTDFY

SEQ ID NO: 69 - protein, 11 aa, Artificial sequence
  Synthetic peptide
SHLYWQPYSVQ

SEQ ID NO: 70 - protein, 12 aa, Artificial sequence
  Synthetic peptide
TLVYWQPYSLQT

SEQ ID NO: 71 - protein, 12 aa, Artificial sequence
  Synthetic peptide
RGDYWQPYSVQS

SEQ ID NO: 72 - protein, 12 aa, Artificial sequence
  Synthetic peptide
VHVYWQPYSVQT

SEQ ID NO: 73 - protein, 12 aa, Artificial sequence
  Synthetic peptide
RLVYWQPYSVQT

SEQ ID NO: 74 - protein, 12 aa, Artificial sequence
  Synthetic peptide
SRVWFQPYSLQS

SEQ ID NO: 75 - protein, 12 aa, Artificial sequence
  Synthetic peptide
NMVYWQPYSIQT

SEQ ID NO: 76 - protein, 12 aa, Artificial sequence
  Synthetic peptide
SVVFWQPYSVQT

SEQ ID NO: 77 - protein, 12 aa, Artificial sequence
  Synthetic peptide
TFVYWQPYALPL

SEQ ID NO: 78 - protein, 12 aa, Artificial sequence
  Synthetic peptide
TLVYWQPYSIQR

SEQ ID NO: 79 - protein, 12 aa, Artificial sequence
  Synthetic peptide
RLVYWQPYSVQR

SEQ ID NO: 80 - protein, 12 aa, Artificial sequence
  Synthetic peptide
SPVFWQPYSIQI

SEQ ID NO: 81 - protein, 12 aa, Artificial sequence
  Synthetic peptide
WIEWWQPYSVQS

SEQ ID NO: 82 - protein, 12 aa, Artificial sequence
  Synthetic peptide
SLIYWQPYSLQM

SEQ ID NO: 83 - protein, 12 aa, Artificial sequence
  Synthetic peptide
TRLYWQPYSVQR

SEQ ID NO: 84 - protein, 12 aa, Artificial sequence
  Synthetic peptide
RCDYWQPYSVQT

SEQ ID NO: 85 - protein, 12 aa, Artificial sequence
  Synthetic peptide
MRVFWQPYSVQN

SEQ ID NO: 86 - protein, 12 aa, Artificial sequence
  Synthetic peptide
KIVYWQPYSVQT

SEQ ID NO: 87 - protein, 12 aa, Artificial sequence
  Synthetic peptide
RHLYWQPYSVQR

SEQ ID NO: 88 - protein, 12 aa, Artificial sequence
  Synthetic peptide
ALVWWQPYSEQI

SEQ ID NO: 89 - protein, 12 aa, Artificial sequence
  Synthetic peptide
SRVWFQPYSLQS

SEQ ID NO: 90 - protein, 10 aa, Artificial sequence
  Synthetic peptide
WEQPYALPLE

SEQ ID NO: 91 - protein, 12 aa, Artificial sequence
  Synthetic peptide
QLVWWQPYSVQR

SEQ ID NO: 92 - protein, 12 aa, Artificial sequence
  Synthetic peptide
DLRYWQPYSVQV

SEQ ID NO: 93 - protein, 12 aa, Artificial sequence
  Synthetic peptide
ELVWWQPYSLQL

SEQ ID NO: 94 - protein, 12 aa, Artificial sequence
  Synthetic peptide
DLVWWQPYSVQW

SEQ ID NO: 95 - protein, 12 aa, Artificial sequence
  Synthetic peptide
NGNYWQPYSFQV

SEQ ID NO: 96 - protein, 12 aa, Artificial sequence
  Synthetic peptide
ELVYWQPYSIQR

SEQ ID NO: 97 - protein, 12 aa, Artificial sequence
  Synthetic peptide
ELMYWQPYSVQE

SEQ ID NO: 98 - protein, 12 aa, Artificial sequence
  Synthetic peptide
NLLYWQPYSMQD

SEQ ID NO: 99 - protein, 12 aa, Artificial sequence
  Synthetic peptide
GYEWYQPYSVQR

SEQ ID NO: 100 - protein, 12 aa, Artificial sequence
  Synthetic peptide
SRVWYQPYSVQR

SEQ ID NO: 101 - protein, 12 aa, Artificial sequence
  Synthetic peptide
LSEQYQPYSVQR

SEQ ID NO: 102 - protein, 12 aa, Artificial sequence
  Synthetic peptide
GGGWWQPYSVQR

SEQ ID NO: 103 - protein, 12 aa, Artificial sequence
  Synthetic peptide
VGRWYQPYSVQR

SEQ ID NO: 104 - protein, 12 aa, Artificial sequence
  Synthetic peptide
VHVYWQPYSVQR

SEQ ID NO: 105 - protein, 12 aa, Artificial sequence
  Synthetic peptide
QARWYQPYSVQR

SEQ ID NO: 106 - protein, 12 aa, Artificial sequence
  Synthetic peptide
VHVYWQPYSVQT

SEQ ID NO: 107 - protein, 12 aa, Artificial sequence
  Synthetic peptide
RSVYWQPYSVQR

SEQ ID NO: 108 - protein, 12 aa, Artificial sequence
  Synthetic peptide
TRVWFQPYSVQR

SEQ ID NO: 109 - protein, 12 aa, Artificial sequence
  Synthetic peptide
GRIWFQPYSVQR

SEQ ID NO: 110 - protein, 12 aa, Artificial sequence
  Synthetic peptide
GRVWFQPYSVQR

SEQ ID NO: 111 - protein, 12 aa, Artificial sequence
  Synthetic peptide
ARTWYQPYSVQR

SEQ ID NO: 112 - protein, 12 aa, Artificial sequence
  Synthetic peptide
ARVWWQPYSVQM

SEQ ID NO: 113 - protein, 12 aa, Artificial sequence
  Synthetic peptide
RLMFYQPYSVQR

SEQ ID NO: 114 - protein, 12 aa, Artificial sequence
  Synthetic peptide
ESMWYQPYSVQR

SEQ ID NO: 115 - protein, 12 aa, Artificial sequence
  Synthetic peptide
HFGWWQPYSVHM

SEQ ID NO: 116 - protein, 12 aa, Artificial sequence
  Synthetic peptide
ARFWWQPYSVQR

SEQ ID NO: 117 - protein, 12 aa, Artificial sequence
  Synthetic peptide
RLVYWQPYAPIY

SEQ ID NO: 118 - protein, 12 aa, Artificial sequence
  Synthetic peptide
RLVYWQPYSYQT

SEQ ID NO: 119 - protein, 12 aa, Artificial sequence
  Synthetic peptide
RLVYWQPYSLPI

SEQ ID NO: 120 - protein, 12 aa, Artificial sequence
  Synthetic peptide
RLVYWQPYSVQA

SEQ ID NO: 121 - protein, 12 aa, Artificial sequence
  Synthetic peptide
SRVWYQPYAKGL

SEQ ID NO: 122 - protein, 12 aa, Artificial sequence
  Synthetic peptide
SRVWYQPYAQGL

SEQ ID NO: 123 - protein, 12 aa, Artificial sequence
  Synthetic peptide
SRVWYQPYAMPL

SEQ ID NO: 124 - protein, 12 aa, Artificial sequence
  Synthetic peptide
SRVWYQPYSVQA

SEQ ID NO: 125 - protein, 12 aa, Artificial sequence
  Synthetic peptide
SRVWYQPYSLGL

SEQ ID NO: 126 - protein, 12 aa, Artificial sequence
  Synthetic peptide
SRVWYQPYAREL

SEQ ID NO: 127 - protein, 12 aa, Artificial sequence
  Synthetic peptide
SRVWYQPYSRQP

SEQ ID NO: 128 - protein, 12 aa, Artificial sequence
  Synthetic peptide
SRVWYQPYFVQP

SEQ ID NO: 129 - protein, 12 aa, Artificial sequence
  Synthetic peptide
EYEWYQPYALPL

SEQ ID NO: 130 - protein, 12 aa, Artificial sequence
  Synthetic peptide
IPEYWQPYALPL

SEQ ID NO: 131 - protein, 12 aa, Artificial sequence
  Synthetic peptide
SRIWWQPYALPL

SEQ ID NO: 132 - protein, 12 aa, Artificial sequence
  Synthetic peptide
DPLFWQPYALPL

SEQ ID NO: 133 - protein, 12 aa, Artificial sequence
  Synthetic peptide
SRQWVQPYALPL

SEQ ID NO: 134 - protein, 12 aa, Artificial sequence
  Synthetic peptide
IRSWWQPYALPL

SEQ ID NO: 135 - protein, 11 aa, Artificial sequence
  Synthetic peptide
RGYWQPYALPL

SEQ ID NO: 136 - protein, 12 aa, Artificial sequence
  Synthetic peptide
RLLWVQPYALPL

SEQ ID NO: 137 - protein, 12 aa, Artificial sequence
  Synthetic peptide
EYRWFQPYALPL

SEQ ID NO: 138 - protein, 12 aa, Artificial sequence
  Synthetic peptide
DAYWVQPYALPL

SEQ ID NO: 139 - protein, 12 aa, Artificial sequence
  Synthetic peptide
WSGYFQPYALPL

SEQ ID NO: 140 - protein, 12 aa, Artificial sequence
  Synthetic peptide
NIEFWQPYALPL

SEQ ID NO: 141 - protein, 12 aa, Artificial sequence
  Synthetic peptide
TRDWVQPYALPL

SEQ ID NO: 142 - protein, 12 aa, Artificial sequence
  Synthetic peptide
DSSWYQPYALPL

SEQ ID NO: 143 - protein, 12 aa, Artificial sequence
  Synthetic peptide
IGNWYQPYALPL

SEQ ID NO: 144 - protein, 12 aa, Artificial sequence
  Synthetic peptide
NLRWDQPYALPL

SEQ ID NO: 145 - protein, 12 aa, Artificial sequence
  Synthetic peptide
LPEFWQPYALPL

SEQ ID NO: 146 - protein, 12 aa, Artificial sequence
  Synthetic peptide
DSYWWQPYALPL

SEQ ID NO: 147 - protein, 12 aa, Artificial sequence
  Synthetic peptide
RSQYYQPYALPL

SEQ ID NO: 148 - protein, 12 aa, Artificial sequence
  Synthetic peptide
ARFWLQPYALPL

SEQ ID NO: 149 - protein, 12 aa, Artificial sequence
  Synthetic peptide
NSYFWQPYALPL

SEQ ID NO: 150 - protein, 12 aa, Artificial sequence
  Synthetic peptide
RFMYWQPYSVQR

SEQ ID NO: 151 - protein, 12 aa, Artificial sequence
  Synthetic peptide
AHLFWQPYSVQR

SEQ ID NO: 152 - protein, 9 aa, Artificial sequence
  Synthetic peptide
WWQPYALPL

SEQ ID NO: 153 - protein, 9 aa, Artificial sequence
  Synthetic peptide
YYQPYALPL

SEQ ID NO: 154 - protein, 9 aa, Artificial sequence
  Synthetic peptide
YFQPYALGL

SEQ ID NO: 155 - protein, 10 aa, Artificial sequence
  Synthetic peptide
YWYQPYALPL

SEQ ID NO: 156 - protein, 10 aa, Artificial sequence
  Synthetic peptide
RWWQPYATPL

SEQ ID NO: 157 - protein, 10 aa, Artificial sequence
  Synthetic peptide
GWYQPYALGF

SEQ ID NO: 158 - protein, 10 aa, Artificial sequence
  Synthetic peptide
YWYQPYALGL

SEQ ID NO: 159 - protein, 10 aa, Artificial sequence
  Synthetic peptide
IWYQPYAMPL

SEQ ID NO: 160 - protein, 10 aa, Artificial sequence
  Synthetic peptide
SNMQPYQRLS

SEQ ID NO: 161 - protein, 20 aa, Artificial sequence
  Synthetic peptide
TFVYWQPYAVGLPAAETACN

SEQ ID NO: 162 - protein, 20 aa, Artificial sequence
  Synthetic peptide
TFVYWQPYSVQMTITGKVTM

SEQ ID NO: 163 - protein, 20 aa, Artificial sequence
  Synthetic peptide
  Misc feature (12)..(13): Xaa can be any naturally occurring amino acid
  Misc feature (16)..(16): Xaa can be any naturally occurring amino acid
TFVYWQPYSSHXXVPXGFPL

SEQ ID NO: 164 - protein, 20 aa, Artificial sequence
  Synthetic peptide
TFVYWQPYYGNPQWAIHVRH

SEQ ID NO: 165 - protein, 20 aa, Artificial sequence
  Synthetic peptide
TFVYWQPYVLLELPEGAVRA

SEQ ID NO: 166 - protein, 20 aa, Artificial sequence
  Synthetic peptide
TFVYWQPYVDYVWPIPIAQV

SEQ ID NO: 167 - protein, 11 aa, Artificial sequence
  Synthetic peptide
GWYQPYVDGWR

SEQ ID NO: 168 - protein, 12 aa, Artificial sequence
  Synthetic peptide
RWEQPYVKDGWS

SEQ ID NO: 169 - protein, 12 aa, Artificial sequence
  Synthetic peptide
EWYQPYALGWAR

SEQ ID NO: 170 - protein, 10 aa, Artificial sequence
  Synthetic peptide
GWWQPYARGL

SEQ ID NO: 171 - protein, 12 aa, Artificial sequence
  Synthetic peptide
LFEQPYAKALGL

SEQ ID NO: 172 - protein, 12 aa, Artificial sequence
  Synthetic peptide
GWEQPYARGLAG

SEQ ID NO: 173 - protein, 12 aa, Artificial sequence
  Synthetic peptide
AWVQPYATPLDE

SEQ ID NO: 174 - protein, 12 aa, Artificial sequence
  Synthetic peptide
MWYQPYSSQPAE

SEQ ID NO: 175 - protein, 12 aa, Artificial sequence
  Synthetic peptide
GWTQPYSQQGEV

SEQ ID NO: 176 - protein, 12 aa, Artificial sequence
  Synthetic peptide
DWFQPYSIQSDE

SEQ ID NO: 177 - protein, 11 aa, Artificial sequence
  Synthetic peptide
PWIQPYARGFG

SEQ ID NO: 178 - protein, 12 aa, Artificial sequence
  Synthetic peptide
RPLYWQPYSVQV

SEQ ID NO: 179 - protein, 12 aa, Artificial sequence
  Synthetic peptide
TLIYWQPYSVQI

SEQ ID NO: 180 - protein, 12 aa, Artificial sequence
  Synthetic peptide
RFDYWQPYSDQT

SEQ ID NO: 181 - protein, 12 aa, Artificial sequence
  Synthetic peptide
WHQFVQPYALPL

SEQ ID NO: 182 - protein, 17 aa, Artificial sequence
  Synthetic peptide
EWDSVYWQPYSVQTLLR

SEQ ID NO: 183 - protein, 17 aa, Artificial sequence
  Synthetic peptide
WEQNVYWQPYSVQSFAD

SEQ ID NO: 184 - protein, 16 aa, Artificial sequence
  Synthetic peptide
SDVVYWQPYSVQSLEM

SEQ ID NO: 185 - protein, 17 aa, Artificial sequence
  Synthetic peptide
YYDGVYWQPYSVQVMPA

SEQ ID NO: 186 - protein, 12 aa, Artificial sequence
  Synthetic peptide
SDIWYQPYALPL

SEQ ID NO: 187 - protein, 12 aa, Artificial sequence
  Synthetic peptide
QRIWWQPYALPL

SEQ ID NO: 188 - protein, 12 aa, Artificial sequence
  Synthetic peptide
SRIWWQPYALPL

SEQ ID NO: 189 - protein, 12 aa, Artificial sequence
  Synthetic peptide
RSLYWQPYALPL

SEQ ID NO: 190 - protein, 12 aa, Artificial sequence
  Synthetic peptide
TIIWEQPYALPL

SEQ ID NO: 191 - protein, 12 aa, Artificial sequence
  Synthetic peptide
WETWYQPYALPL

SEQ ID NO: 192 - protein, 12 aa, Artificial sequence
  Synthetic peptide
SYDWEQPYALPL

SEQ ID NO: 193 - protein, 12 aa, Artificial sequence
  Synthetic peptide
SRIWCQPYALPL

SEQ ID NO: 194 - protein, 12 aa, Artificial sequence
  Synthetic peptide
EIMFWQPYALPL

SEQ ID NO: 195 - protein, 12 aa, Artificial sequence
  Synthetic peptide
DYVWQQPYALPL

SEQ ID NO: 196 - protein, 15 aa, Artificial sequence
  Synthetic peptide
MDLLVQWYQPYALPL

SEQ ID NO: 197 - protein, 15 aa, Artificial sequence
  Synthetic peptide
GSKVILWYQPYALPL

SEQ ID NO: 198 - protein, 15 aa, Artificial sequence
  Synthetic peptide
RQGANIWYQPYALPL

SEQ ID NO: 199 - protein, 15 aa, Artificial sequence
  Synthetic peptide
GGGDEPWYQPYALPL

SEQ ID NO: 200 - protein, 15 aa, Artificial sequence
  Synthetic peptide
SQLERTWYQPYALPL

SEQ ID NO: 201 - protein, 15 aa, Artificial sequence
  Synthetic peptide
ETWVREWYQPYALPL

SEQ ID NO: 202 - protein, 15 aa, Artificial sequence
  Synthetic peptide
KKGSTQWYQPYALPL

SEQ ID NO: 203 - protein, 15 aa, Artificial sequence
  Synthetic peptide
LQARMNWYQPYALPL

SEQ ID NO: 204 - protein, 15 aa, Artificial sequence
  Synthetic peptide
EPRSQKWYQPYALPL

SEQ ID NO: 205 - protein, 15 aa, Artificial sequence
  Synthetic peptide
VKQKWRWYQPYALPL

SEQ ID NO: 206 - protein, 15 aa, Artificial sequence
  Synthetic peptide
LRRHDVWYQPYALPL

SEQ ID NO: 207 - protein, 15 aa, Artificial sequence
  Synthetic peptide
RSTASIWYQPYALPL

SEQ ID NO: 208 - protein, 15 aa, Artificial sequence
  Synthetic peptide
ESKEDQWYQPYALPL

SEQ ID NO: 209 - protein, 15 aa, Artificial sequence
  Synthetic peptide
EGLTMKWYQPYALPL

SEQ ID NO: 210 - protein, 15 aa, Artificial sequence
  Synthetic peptide
EGSREGWYQPYALPL

SEQ ID NO: 211 - protein, 12 aa, Artificial sequence
  Synthetic peptide
VIEWWQPYALPL

SEQ ID NO: 212 - protein, 12 aa, Artificial sequence
  Synthetic peptide
VWYWEQPYALPL

SEQ ID NO: 213 - protein, 12 aa, Artificial sequence
  Synthetic peptide
ASEWWQPYALPL

SEQ ID NO: 214 - protein, 12 aa, Artificial sequence
  Synthetic peptide
FYEWWQPYALPL

SEQ ID NO: 215 - protein, 12 aa, Artificial sequence
  Synthetic peptide
EGWWVQPYALPL

SEQ ID NO: 216 - protein, 12 aa, Artificial sequence
  Synthetic peptide
WGEWLQPYALPL

SEQ ID NO: 217 - protein, 12 aa, Artificial sequence
  Synthetic peptide
DYVWEQPYALPL

SEQ ID NO: 218 - protein, 12 aa, Artificial sequence
  Synthetic peptide
AHTWWQPYALPL

SEQ ID NO: 219 - protein, 12 aa, Artificial sequence
  Synthetic peptide
FIEWFQPYALPL

SEQ ID NO: 220 - protein, 12 aa, Artificial sequence
  Synthetic peptide
WLAWEQPYALPL

SEQ ID NO: 221 - protein, 12 aa, Artificial sequence
  Synthetic peptide
VMEWWQPYALPL

SEQ ID NO: 222 - protein, 11 aa, Artificial sequence
  Synthetic peptide
ERMWQPYALPL

SEQ ID NO: 223 - protein, 12 aa, Artificial sequence
  Synthetic peptide
  Misc feature (2)..(3): Xaa can be any naturally occurring amino acid
  Misc feature (5)..(6): Xaa can be any naturally occurring amino acid
NXXWXXPYALPL

SEQ ID NO: 224 - protein, 12 aa, Artificial sequence
  Synthetic peptide
WGNWYQPYALPL

SEQ ID NO: 225 - protein, 12 aa, Artificial sequence
  Synthetic peptide
TLYWEQPYALPL

SEQ ID NO: 226 - protein, 12 aa, Artificial sequence
  Synthetic peptide
VWRWEQPYALPL

SEQ ID NO: 227 - protein, 11 aa, Artificial sequence
  Synthetic peptide
LLWTQPYALPL

SEQ ID NO: 228 - protein, 12 aa, Artificial sequence
  Synthetic peptide
  Misc feature (5)..(6): Xaa can be any naturally occurring amino acid
SRIWXXPYALPL

SEQ ID NO: 229 - protein, 12 aa, Artificial sequence
  Synthetic peptide
SDIWYQPYALPL

SEQ ID NO: 230 - protein, 12 aa, Artificial sequence
  Synthetic peptide
  Misc feature (5)..(6): Xaa can be any naturally occurring amino acid
WGYYXXPYALPL

SEQ ID NO: 231 - protein, 12 aa, Artificial sequence
  Synthetic peptide
TSGWYQPYALPL

SEQ ID NO: 232 - protein, 12 aa, Artificial sequence
  Synthetic peptide
  Misc feature (5)..(6): Xaa can be any naturally occurring amino acid
VHPYXXPYALPL

SEQ ID NO: 233 - protein, 12 aa, Artificial sequence
  Synthetic peptide
EHSYFQPYALPL

SEQ ID NO: 234 - protein, 12 aa, Artificial sequence
  Synthetic peptide
  Misc feature (1)..(2): Xaa can be any naturally occurring amino acid
XXIWYQPYALPL

SEQ ID NO: 235 - protein, 12 aa, Artificial sequence
  Synthetic peptide
AQLHSQPYALPL

SEQ ID NO: 236 - protein, 12 aa, Artificial sequence
  Synthetic peptide
WANWFQPYALPL

SEQ ID NO: 237 - protein, 12 aa, Artificial sequence
  Synthetic peptide
SRLYSQPYALPL

SEQ ID NO: 238 - protein, 12 aa, Artificial sequence
  Synthetic peptide
GVTFSQPYALPL

SEQ ID NO: 239 - protein, 12 aa, Artificial sequence
  Synthetic peptide
SIVWSQPYALPL

SEQ ID NO: 240 - protein, 12 aa, Artificial sequence
  Synthetic peptide
SRDLVQPYALPL

SEQ ID NO: 241 - protein, 17 aa, Artificial sequence
  Synthetic peptide
HWGHVYWQPYSVQDDLG

SEQ ID NO: 242 - protein, 17 aa, Artificial sequence
  Synthetic peptide
SWHSVYWQPYSVQSVPE

SEQ ID NO: 243 - protein, 17 aa, Artificial sequence
  Synthetic peptide
WRDSVYWQPYSVQPESA

SEQ ID NO: 244 - protein, 17 aa, Artificial sequence
  Synthetic peptide
TWDAVYWQPYSVQKWLD

SEQ ID NO: 245 - protein, 17 aa, Artificial sequence
  Synthetic peptide
TPPWVYWQPYSVQSLDP

SEQ ID NO: 246 - protein, 17 aa, Artificial sequence
  Synthetic peptide
YWSSVYWQPYSVQSVHS

SEQ ID NO: 247 - protein, 10 aa, Artificial sequence
  Synthetic peptide
YWYQPYALGL

SEQ ID NO: 248 - protein, 10 aa, Artificial sequence
  Synthetic peptide
YWYQPYALPL

SEQ ID NO: 249 - protein, 10 aa, Artificial sequence
  Synthetic peptide
EWIQPYATGL

SEQ ID NO: 250 - protein, 10 aa, Artificial sequence
  Synthetic peptide
NWEQPYAKPL

SEQ ID NO: 251 - protein, 10 aa, Artificial sequence
  Synthetic peptide
AFYQPYALPL

SEQ ID NO: 252 - protein, 10 aa, Artificial sequence
  Synthetic peptide
FLYQPYALPL

SEQ ID NO: 253 - protein, 10 aa, Artificial sequence
  Synthetic peptide
VCKQPYLEWC

SEQ ID NO: 254 - protein, 21 aa, Artificial sequence
  Synthetic peptide
ETPFTWEESNAYYWQPYALPL

SEQ ID NO: 255 - protein, 21 aa, Artificial sequence
  Synthetic peptide
QGWLTWQDSVDMYWQPYALPL

SEQ ID NO: 256 - protein, 21 aa, Artificial sequence
  Synthetic peptide
FSEAGYTWPENTYWQPYALPL

SEQ ID NO: 257 - protein, 21 aa, Artificial sequence
  Synthetic peptide
TESPGGLDWAKIYWQPYALPL

SEQ ID NO: 258 - protein, 21 aa, Artificial sequence
  Synthetic peptide
DGYDRWRQSGERYWQPYALPL

SEQ ID NO: 259 - protein, 21 aa, Artificial sequence
  Synthetic peptide
TANVSSFEWTPGYWQPYALPL

SEQ ID NO: 260 - protein, 21 aa, Artificial sequence
  Synthetic peptide
SVGEDHNFWTSEYWQPYALPL

SEQ ID NO: 261 - protein, 21 aa, Artificial sequence
  Synthetic peptide
MNDQTSEVSTFPYWQPYALPL

SEQ ID NO: 262 - protein, 21 aa, Artificial sequence
  Synthetic peptide
SWSEAFEQPRNLYWQPYALPL

SEQ ID NO: 263 - protein, 21 aa, Artificial sequence
  Synthetic peptide
QYAEPSALNDWGYWQPYALPL

SEQ ID NO: 264 - protein, 21 aa, Artificial sequence
  Synthetic peptide
NGDWATADWSNYYWQPYALPL

SEQ ID NO: 265 - protein, 15 aa, Artificial sequence
  Synthetic peptide
THDEHIYWQPYALPL

SEQ ID NO: 266 - protein, 21 aa, Artificial sequence
  Synthetic peptide
MLEKTYTTWTPGYWQPYALPL

SEQ ID NO: 267 - protein, 20 aa, Artificial sequence
  Synthetic peptide
WSDPLTRDADLYWQPYALPL

SEQ ID NO: 268 - protein, 21 aa, Artificial sequence
  Synthetic peptide
SDAFTTQDSQAMYWQPYALPL

SEQ ID NO: 269 - protein, 21 aa, Artificial sequence
  Synthetic peptide
GDDAAWRTDSLTYWQPYALPL

SEQ ID NO: 270 - protein, 21 aa, Artificial sequence
  Synthetic peptide
AIIRQLYRWSEMYWQPYALPL

SEQ ID NO: 271 - protein, 21 aa, Artificial sequence
  Synthetic peptide
ENTYSPNWADSMYWQPYALPL

SEQ ID NO: 272 - protein, 21 aa, Artificial sequence
  Synthetic peptide
MNDQTSEVSTFPYWQPYALPL

SEQ ID NO: 273 - protein, 21 aa, Artificial sequence
  Synthetic peptide
SVGEDHNFWTSEYWQPYALPL

SEQ ID NO: 274 - protein, 21 aa, Artificial sequence
  Synthetic peptide
QTPFTWEESNAYYWQPYALPL

SEQ ID NO: 275 - protein, 21 aa, Artificial sequence
  Synthetic peptide
ENPFTWQESNAYYWQPYALPL

SEQ ID NO: 276 - protein, 21 aa, Artificial sequence
  Synthetic peptide
VTPFTWEDSNVFYWQPYALPL

SEQ ID NO: 277 - protein, 21 aa, Artificial sequence
  Synthetic peptide
QIPFTWEQSNAYYWQPYALPL

SEQ ID NO: 278 - protein, 21 aa, Artificial sequence
  Synthetic peptide
QAPLTWQESAAYYWQPYALPL

SEQ ID NO: 279 - protein, 21 aa, Artificial sequence
  Synthetic peptide
EPTFTWEESKATYWQPYALPL

SEQ ID NO: 280 - protein, 21 aa, Artificial sequence
  Synthetic peptide
TTTLTWEESNAYYWQPYALPL

SEQ ID NO: 281 - protein, 21 aa, Artificial sequence
  Synthetic peptide
ESPLTWEESSALYWQPYALPL

SEQ ID NO: 282 - protein, 21 aa, Artificial sequence
  Synthetic peptide
ETPLTWEESNAYYWQPYALPL

SEQ ID NO: 283 - protein, 21 aa, Artificial sequence
  Synthetic peptide
EATFTWAESNAYYWQPYALPL

SEQ ID NO: 284 - protein, 21 aa, Artificial sequence
  Synthetic peptide
EALFTWKESTAYYWQPYALPL

SEQ ID NO: 285 - protein, 20 aa, Artificial sequence
  Synthetic peptide
STPTWEESNAYYWQPYALPL

SEQ ID NO: 286 - protein, 21 aa, Artificial sequence
  Synthetic peptide
ETPFTWEESNAYYWQPYALPL

SEQ ID NO: 287 - protein, 21 aa, Artificial sequence
  Synthetic peptide
KAPFTWEESQAYYWQPYALPL

SEQ ID NO: 288 - protein, 21 aa, Artificial sequence
  Synthetic peptide
STSFTWEESNAYYWQPYALPL

SEQ ID NO: 289 - protein, 21 aa, Artificial sequence
  Synthetic peptide
DSTFTWEESNAYYWQPYALPL

SEQ ID NO: 290 - protein, 21 aa, Artificial sequence
  Synthetic peptide
YIPFTWEESNAYYWQPYALPL

SEQ ID NO: 291 - protein, 21 aa, Artificial sequence
  Synthetic peptide
QTAFTWEESNAYYWQPYALPL

SEQ ID NO: 292 - protein, 21 aa, Artificial sequence
  Synthetic peptide
ETLFTWEESNATYWQPYALPL

SEQ ID NO: 293 - protein, 21 aa, Artificial sequence
  Synthetic peptide
VSSFTWEESNAYYWQPYALPL

SEQ ID NO: 294 - protein, 7 aa, Artificial sequence
  Synthetic peptide
QPYALPL

SEQ ID NO: 295 - protein, 10 aa, Artificial sequence
  Synthetic peptide
  Misc feature (1)..(1): Xaa=Unsure
  Misc feature (2)..(2): Ala modified to 1-naphthylalanine at position 2
  Misc feature (5)..(6): Azetidine is between residues 5 and 6
XAPYQYALPL

SEQ ID NO: 296 - protein, 21 aa, Artificial sequence
  Synthetic peptide
TANVSSFEWTPGYWQPYALPL

SEQ ID NO: 297 - protein, 15 aa, Artificial sequence
  Synthetic peptide
FEWTPGYWQPYALPL

SEQ ID NO: 298 - protein, 14 aa, Artificial sequence
  Synthetic peptide
  Misc feature (9)..(10): Azetidine is between residues 9 and 10
FEWTPGYWQYALPL

SEQ ID NO: 299 - protein, 14 aa, Artificial sequence
  Synthetic peptide
  Misc feature (9)..(10): Azetidine is between residues 9 and 10
FEWTPGYYQYALPL

SEQ ID NO: 300 - protein, 21 aa, Artificial sequence
  Synthetic peptide
ETPFTWEESNAYYWQPYALPL

SEQ ID NO: 301 - protein, 17 aa, Artificial sequence
  Synthetic peptide
  Misc feature (12)..(13): Azetidine is between residues 12 and 13
FTWEESNAYYWQYALPL

SEQ ID NO: 302 - protein, 16 aa, Artificial sequence
  Synthetic peptide
ADVLYWQPYAPVTLWV

SEQ ID NO: 303 - protein, 17 aa, Artificial sequence
  Synthetic peptide
GDVAEYWQPYALPLTSL

SEQ ID NO: 304 - protein, 18 aa, Artificial sequence
  Synthetic peptide
SWTDYGYWQPYALPISGL

SEQ ID NO: 305 - protein, 15 aa, Artificial sequence
  Synthetic peptide
FEWTPGYWQPYALPL

SEQ ID NO: 306 - protein, 14 aa, Artificial sequence
  Synthetic peptide
  Misc feature (9)..(10): Azetidine is between residues 9 and 10
FEWTPGYWQYALPL

SEQ ID NO: 307 - protein, 15 aa, Artificial sequence
  Synthetic peptide
FEWTPGWYQPYALPL

SEQ ID NO: 308 - protein, 14 aa, Artificial sequence
  Synthetic peptide
  Misc feature (9)..(10): Azetidine is between residues 9 and 10
FEWTPGWYQYALPL

SEQ ID NO: 309 - protein, 15 aa, Artificial sequence
  Synthetic peptide
FEWTPGYYQPYALPL

SEQ ID NO: 310 - protein, 14 aa, Artificial sequence
  Synthetic peptide
  Misc feature (9)..(10): Azetidine is between residues 9 and 10
FEWTPGYYQYALPL

SEQ ID NO: 311 - protein, 21 aa, Artificial sequence
  Synthetic peptide
TANVSSFEWTPGYWQPYALPL

SEQ ID NO: 312 - protein, 18 aa, Artificial sequence
  Synthetic peptide
SWTDYGYWQPYALPISGL

SEQ ID NO: 313 - protein, 21 aa, Artificial sequence
  Synthetic peptide
ETPFTWEESNAYYWQPYALPL

SEQ ID NO: 314 - protein, 21 aa, Artificial sequence
  Synthetic peptide
ENTYSPNWADSMYWQPYALPL

SEQ ID NO: 315 - protein, 21 aa, Artificial sequence
  Synthetic peptide
SVGEDHNFWTSEYWQPYALPL

SEQ ID NO: 316 - protein, 21 aa, Artificial sequence
  Synthetic peptide
DGYDRWRQSGERYWQPYALPL

SEQ ID NO: 317 - protein, 15 aa, Artificial sequence
  Synthetic peptide
FEWTPGYWQPYALPL

SEQ ID NO: 318 - protein, 11 aa, Artificial sequence
  Synthetic peptide
FEWTPGYWQPY

SEQ ID NO: 319 - protein, 10 aa, Artificial sequence
  Synthetic peptide
  Misc feature (9)..(10): Azetidine is between residues 9 and 10
FEWTPGYWQY

SEQ ID NO: 320 - protein, 10 aa, Artificial sequence
  Synthetic peptide
EWTPGYWQPY

SEQ ID NO: 321 - protein, 10 aa, Artificial sequence
  Synthetic peptide
  Misc feature (9)..(10): Azetidine is between residues 9 and 10
FEWTPGWYQY

SEQ ID NO: 322 - protein, 10 aa, Artificial sequence
  Synthetic peptide
  Misc feature (9)..(10): Azetidine is between residues 9 and 10
AEWTPGYWQY

SEQ ID NO: 323 - protein, 10 aa, Artificial sequence
  Synthetic peptide
  Misc feature (9)..(10): Azetidine is between residues 9 and 10
FAWTPGYWQY

SEQ ID NO: 324 - protein, 10 aa, Artificial sequence
  Synthetic peptide
  Misc feature (9)..(10): Azetidine is between residues 9 and 10
FEATPGYWQY

SEQ ID NO: 325 - protein, 10 aa, Artificial sequence
  Synthetic peptide
  Misc feature (9)..(10): Azetidine is between residues 9 and 10
FEWAPGYWQY

SEQ ID NO: 326 - protein, 10 aa, Artificial sequence
  Synthetic peptide
  Misc feature (9)..(10): Azetidine is between residues 9 and 10
FEWTAGYWQY

SEQ ID NO: 327 - protein, 10 aa, Artificial sequence
  Synthetic peptide
  Misc feature (9)..(10): Azetidine is between residues 9 and 10
FEWTPAYWQY

SEQ ID NO: 328 - protein, 10 aa, Artificial sequence
  Synthetic peptide
  Misc feature (9)..(10): Azetidine is between residues 9 and 10
FEWTPGAWQY

SEQ ID NO: 329 - protein, 10 aa, Artificial sequence
  Synthetic peptide
  Misc feature (9)..(10): Azetidine is between residues 9 and 10
FEWTPGYAQY

SEQ ID NO: 330 - protein, 10 aa, Artificial sequence
  Synthetic peptide
  Misc feature (9)..(10): Azetidine is between residues 9 and 10
FEWTPGYWQA

SEQ ID NO: 331 - protein, 10 aa, Artificial sequence
  Synthetic peptide
  Misc feature (9)..(10): Azetidine is between residues 9 and 10
FEWTGGYWQY

SEQ ID NO: 332 - protein, 10 aa, Artificial sequence
  Synthetic peptide
  Misc feature (5)..(5): D-Pro
  Misc feature (9)..(10): Azetidine is between residues 9 and 10
FEWTPGYWQY

SEQ ID NO: 333 - protein, 9 aa, Artificial sequence
  Synthetic peptide
  Misc feature (4)..(5): Azetidine is between residues 4 and 5
  Misc feature (8)..(9): Azetidine is between residues 8 and 9
FEWTGYWQY

SEQ ID NO: 334 - protein, 9 aa, Artificial sequence
  Synthetic peptide
  Misc feature (4)..(5): Pipecolic acid is between residues 4 and 5
  Misc feature (8)..(9): Azetidine is between residues 8 and 9
FEWTGYWQY

SEQ ID NO: 335 - protein, 9 aa, Artificial sequence
  Synthetic peptide
  Misc feature (5)..(6): Aminoisobutyric acid is between residues 5 and 6
  Misc feature (8)..(9): Azetidine is between residues 8 and 9
FEWTPYWQY

SEQ ID NO: 336 - protein, 10 aa, Artificial sequence
  Synthetic peptide
  Misc feature (6)..(6): Xaa=Sarcosine
  Misc feature (9)..(10): Azetidine is between residues 9 and 10
FEWTPXWYQY

SEQ ID NO: 337 - protein, 10 aa, Artificial sequence
  Synthetic peptide
  Misc feature (5)..(5): Xaa=Sarcosine
  Misc feature (9)..(10): Azetidine is between residues 9 and 10
FEWTXGYWQY

SEQ ID NO: 338 - protein, 10 aa, Artificial sequence
  Synthetic peptide
  Misc feature (9)..(10): Azetidine is between residues 9 and 10
FEWTPNYWQY

SEQ ID NO: 339 - protein, 10 aa, Artificial sequence
  Synthetic peptide
  Misc feature (9)..(10): Azetidine is between residues 9 and 10
FEWTPVYWQY

SEQ ID NO: 340 - protein, 10 aa, Artificial sequence
  Synthetic peptide
  Misc feature (9)..(10): Azetidine is between residues 9 and 10
FEWTVPYWQY

SEQ ID NO: 341 - protein, 10 aa, Artificial sequence
  Synthetic peptide
  Acetylation (1)..(1): Acetylated phenylalanine at position 1
  Misc feature (9)..(10): Azetidine is between residues 9 and 10
FEWTPGWYQY

SEQ ID NO: 342 - protein, 10 aa, Artificial sequence
  Synthetic peptide
  Acetylation (1)..(1): Acetylated phenylalanine at position 1
  Misc feature (9)..(10): Azetidine is between residues 9 and 10
FEWTPGYWQY

SEQ ID NO: 343 - protein, 10 aa, Artificial sequence
  Synthetic peptide
  Misc feature (1)..(1): Ala modified to 1-naphthylalanine at position 1
  Misc feature (9)..(10): Azetidine is between residues 9 and 10
AEWTPGYYQY

SEQ ID NO: 344 - protein, 10 aa, Artificial sequence
  Synthetic peptide
  Misc feature (9)..(10): Azetidine is between residues 9 and 10
YEWTPGYYQY

SEQ ID NO: 345 - protein, 10 aa, Artificial sequence
  Synthetic peptide
  Misc feature (9)..(10): Azetidine is between residues 9 and 10
FEWVPGYYQY

SEQ ID NO: 346 - protein, 10 aa, Artificial sequence
  Synthetic peptide
  Misc feature (9)..(10): Azetidine is between residues 9 and 10
FEWTPGYYQY

SEQ ID NO: 347 - protein, 10 aa, Artificial sequence
  Synthetic peptide
  Misc feature (9)..(10): Azetidine is between residues 9 and 10
FEWTPSYYQY

SEQ ID NO: 348 - protein, 10 aa, Artificial sequence
  Synthetic peptide
  Misc feature (9)..(10): Azetidine is between residues 9 and 10
FEWTPNYYQY

SEQ ID NO: 349 - protein, 12 aa, Artificial sequence
  Synthetic peptide
  Misc feature (5)..(5): Ala modified to 1-naphthylalanine at position 5
SHLYAQPYSVQM

SEQ ID NO: 350 - protein, 12 aa, Artificial sequence
  Synthetic peptide
  Misc feature (5)..(5): Ala modified to 1-naphthylalanine at position 5
TLVYAQPYSLQT

SEQ ID NO: 351 - protein, 12 aa, Artificial sequence
  Synthetic peptide
  Misc feature (5)..(5): Ala modified to 1-naphthylalanine at position 5
RGDYAQPYSVQS

SEQ ID NO: 352 - protein, 12 aa, Artificial sequence
  Synthetic peptide
  Misc feature (5)..(5): Ala modified to 1-naphthylalanine at position 5
NMVYAQPYSIQT

SEQ ID NO: 353 - protein, 9 aa, Artificial sequence
  Synthetic peptide
VYWQPYSVQ

SEQ ID NO: 354 - protein, 9 aa, Artificial sequence
  Synthetic peptide
  Misc feature (3)..(3): Ala modified to 1-naphthylalanine at position 5
VYAQPYSVQ

SEQ ID NO: 355 - protein, 11 aa, Artificial sequence
  Synthetic peptide
  Misc feature (6)..(7): Azetidine is between residues 6 and 7
TFVYWQYALPL

SEQ ID NO: 356 - protein, 10 aa, Artificial sequence
  Synthetic peptide
  Misc feature (9)..(10): Azetidine is between residues 9 and 10
  Misc feature (10)..(10): Phe modified to p-benzoyl-L-phenylalanine at position 10
FEWTPGYYQF

SEQ ID NO: 357 - protein, 10 aa, Artificial sequence
  Synthetic peptide
  Misc feature (9)..(10): Azetidine is between residues 9 and 10
  Misc feature (10)..(10): Phe modified to p-benzoyl-L-phenylalanine at position 10
FEWTPGYYQF

SEQ ID NO: 358 - protein, 10 aa, Artificial sequence
  Synthetic peptide
  Misc feature (8)..(8): Xaa=p-benzoyl-L-phenylalanine
  Misc feature (9)..(10): Azetidine is between residues 9 and 10
FEWTPGYXQY

SEQ ID NO: 359 - protein, 10 aa, Artificial sequence
  Synthetic peptide
  Acetylation (1)..(1): Acetylated phenylalanine at position 1
  Misc feature (8)..(8): Phe modified to p-benzoyl-L-phenylalanine at position 8
  Misc feature (9)..(10): Azetidine is between positions 9 and 10
FEWTPGYFQY

SEQ ID NO: 360 - protein, 10 aa, Artificial sequence
  Synthetic peptide
  Misc feature (7)..(7): Phe modified to p-benzoyl-L-phenylalanine at position 7
  Misc feature (9)..(10): Azetidine is between residues 9 and 10
FEWTPGFYQY

SEQ ID NO: 361 - protein, 10 aa, Artificial sequence
  Synthetic peptide
  Acetylation (1)..(1): Acetylated phenylalanine at position 1
  Misc feature (7)..(7): Phe modified to p-benzoyl-L-phenylalanine at position 7
  Misc feature (9)..(10): Azetidine is between residues 9 and 10
FEWTPGFYQY

SEQ ID NO: 362 - protein, 10 aa, Artificial sequence
  Synthetic peptide
  Acetylation (1)..(1): Acetylated phenylalanine at position 1
  Misc feature (3)..(3): Phe modified to p-benzoyl-L-phenylalanine at position 3
  Misc feature (9)..(10): Azetidine is between residues 9 and 10
FEFTPGYYQY

SEQ ID NO: 363 - protein, 10 aa, Artificial sequence
  Synthetic peptide
  Acetylation (1)..(1): Acetylated phenylalanine at position 1
  Misc feature (3)..(3): Phe modified to p-benzoyl-L-phenylalanine at position 3
  Misc feature (9)..(10): Azetidine is between residues 9 and 10
FEFTPGYYQY

SEQ ID NO: 364 - protein, 10 aa, Artificial sequence
  Synthetic peptide
  Misc feature (1)..(1): Phe modified to p-benzoyl-L-phenylalanine at position 1
  Misc feature (9)..(10): Azetidine is between residues 9 and 10
FEWTPGYYQY

SEQ ID NO: 365 - protein, 10 aa, Artificial sequence
  Synthetic peptide
  Misc feature (1)..(1): Phe modified to acetylated p-benzoyl-L-phenylalanine at position 1
  Misc feature (9)..(10): Azetidine is between residues 9 and 10
FEWTPGYYQY

SEQ ID NO: 366 - protein, 9 aa, Artificial sequence
  Synthetic peptide
VYWQPYSVQ

SEQ ID NO: 367 - protein, 12 aa, Artificial sequence
  Synthetic peptide
RLVYWQPYSVQR

SEQ ID NO: 368 - protein, 12 aa, Artificial sequence
  Synthetic peptide
  Misc feature (5)..(5): Ala modified to 1-naphthylalanine at position 5
RLVYAQPYSVQR

SEQ ID NO: 369 - protein, 12 aa, Artificial sequence
  Synthetic peptide
RLDYWQPYSVQR

SEQ ID NO: 370 - protein, 12 aa, Artificial sequence
  Synthetic peptide
RLVWFQPYSVQR

SEQ ID NO: 371 - protein, 12 aa, Artificial sequence
  Synthetic peptide
RLVYWQPYSIQR

SEQ ID NO: 372 - protein, 11 aa, Artificial sequence
  Synthetic peptide
DNSSWYDSFLL

SEQ ID NO: 373 - protein, 11 aa, Artificial sequence
  Synthetic peptide
DNTAWYESFLA

SEQ ID NO: 374 - protein, 11 aa, Artificial sequence
  Synthetic peptide
DNTAWYENFLL

SEQ ID NO: 375 - protein, 17 aa, Artificial sequence
  Synthetic peptide
PAREDNTAWYDSFLIWC

SEQ ID NO: 376 - protein, 17 aa, Artificial sequence
  Synthetic peptide
TSEYDNTTWYEKFLASQ

SEQ ID NO: 377 - protein, 17 aa, Artificial sequence
  Synthetic peptide
SQIPDNTAWYQSFLLHG

SEQ ID NO: 378 - protein, 17 aa, Artificial sequence
  Synthetic peptide
SPFIDNTAWYENFLLTY

SEQ ID NO: 379 - protein, 17 aa, Artificial sequence
  Synthetic peptide
EQIYDNTAWYDHFLLSY

SEQ ID NO: 380 - protein, 17 aa, Artificial sequence
  Synthetic peptide
TPFIDNTAWYENFLLTY

SEQ ID NO: 381 - protein, 17 aa, Artificial sequence
  Synthetic peptide
TYTYDNTAWYERFLMSY

SEQ ID NO: 382 - protein, 17 aa, Artificial sequence
  Synthetic peptide
TMTQDNTAWYENFLLSY

SEQ ID NO: 383 - protein, 17 aa, Artificial sequence
  Synthetic peptide
TIDNTAWYANLVQTYPQ

SEQ ID NO: 384 - protein, 17 aa, Artificial sequence
  Synthetic peptide
TIDNTAWYERFLAQYPD

SEQ ID NO: 385 - protein, 17 aa, Artificial sequence
  Synthetic peptide
HIDNTAWYENFLLTYTP

SEQ ID NO: 386 - protein, 17 aa, Artificial sequence
  Synthetic peptide
SQDNTAWYENFLLSYKA

SEQ ID NO: 387 - protein, 17 aa, Artificial sequence
  Synthetic peptide
QIDNTAWYERFLLQYNA

SEQ ID NO: 388 - protein, 17 aa, Artificial sequence
  Synthetic peptide
NQDNTAWYESFLLQYNT

SEQ ID NO: 389 - protein, 17 aa, Artificial sequence
  Synthetic peptide
TIDNTAWYENFLLNHNL

SEQ ID NO: 390 - protein, 17 aa, Artificial sequence
  Synthetic peptide
HYDNTAWYERFLQQGWH

SEQ ID NO: 391 - protein, 21 aa, Artificial sequence
  Synthetic peptide
ETPFTWEESNAYYWQPYALPL

SEQ ID NO: 392 - protein, 21 aa, Artificial sequence
  Synthetic peptide
YIPFTWEESNAYYWQPYALPL

SEQ ID NO: 393 - protein, 21 aa, Artificial sequence
  Synthetic peptide
DGYDRWRQSGERYWQPYALPL

SEQ ID NO: 394 - protein, 9 aa, Artificial sequence
  Synthetic peptide
  Phosphorylation (1)..(1): Phosphotyrosine at position 1
  Misc feature (2)..(2): Ala modified to 1-naphthylalanine at position 2
  Phosphorylation (3)..(3): Phosphotyrosine at position 3
  Misc feature (4)..(5): Azetidine is between residues 4 and 5
YAYQYALPL

SEQ ID NO: 395 - protein, 21 aa, Artificial sequence
  Synthetic peptide
TANVSSFEWTPGYWQPYALPL

SEQ ID NO: 396 - protein, 14 aa, Artificial sequence
  Synthetic peptide
  Misc feature (9)..(10): Azetidine is between residues 9 and 10
FEWTPGYWQYALPL

SEQ ID NO: 397 - protein, 17 aa, Artificial sequence
  Synthetic peptide
FEWTPGYWQPYALPLSD

SEQ ID NO: 398 - protein, 14 aa, Artificial sequence
  Synthetic peptide
  Misc feature (9)..(10): Azetidine is between residues 9 and 10
FEWTPGYYQYALPL

SEQ ID NO: 399 - protein, 10 aa, Artificial sequence
  Synthetic peptide
  Misc feature (9)..(10): Azetidine is between residues 9 and 10
FEWTPGYWQY

SEQ ID NO: 400 - protein, 10 aa, Artificial sequence
  Synthetic peptide
  Acetylation (1)..(1): Acetylated phenylalanine at position 1
  Misc feature (9)..(10): Azetidine is between residues 9 and 10
FEWTPGYWQY

SEQ ID NO: 401 - protein, 10 aa, Artificial sequence
  Synthetic peptide
  Acetylation (1)..(1): Acetylated phenylalanine at position 1
  Misc feature (9)..(10): Azetidine is between residues 9 and 10
FEWTPGWYQY

SEQ ID NO: 402 - protein, 10 aa, Artificial sequence
  Synthetic peptide
  Acetylation (1)..(1): Acetylated phenylalanine at position 1
  Misc feature (9)..(10): Azetidine is between residues 9 and 10
FEWTPGYYQY

SEQ ID NO: 403 - protein, 10 aa, Artificial sequence
  Synthetic peptide
  Acetylation (1)..(1): Acetylated phenylalanine at position 1
  Misc feature (9)..(10): Azetidine is between residues 9 and 10
FEWTPAYWQY

SEQ ID NO: 404 - protein, 10 aa, Artificial sequence
  Synthetic peptide
  Acetylation (1)..(1): Acetylated phenylalanine at position 1
  Misc feature (9)..(10): Azetidine is between residues 9 and 10
FEWTPAWYQY

SEQ ID NO: 405 - protein, 10 aa, Artificial sequence
  Synthetic peptide
  Acetylation (1)..(1): Acetylated phenylalanine at position 1
  Misc feature (9)..(10): Azetidine is between residues 9 and 10
FEWTPAYYQY

SEQ ID NO: 406 - protein, 14 aa, Artificial sequence
  Synthetic peptide
  Misc feature (9)..(10): Azetidine is between residues 9 and 10
FEWTPGYYQYALPL

SEQ ID NO: 407 - protein, 14 aa, Artificial sequence
  Synthetic peptide
  Misc feature (9)..(10): Azetidine is between residues 9 and 10
FEWTPGYWQYALPL

SEQ ID NO: 408 - protein, 14 aa, Artificial sequence
  Synthetic peptide
  Misc feature (9)..(10): Azetidine is between residues 9 and 10
FEWTPGWYQYALPL

SEQ ID NO: 409 - protein, 21 aa, Artificial sequence
  Synthetic peptide
TANVSSFEWTPGYWQPYALPL

SEQ ID NO: 410 - protein, 10 aa, Artificial sequence
  Synthetic peptide
  Acetylation (1)..(1): Acetylated phenylalanine at position 1
  Misc feature (9)..(10): Azetidine is between residues 9 and 10
FEWTPGYWQY

SEQ ID NO: 411 - protein, 10 aa, Artificial sequence
  Synthetic peptide
  Acetylation (1)..(1): Acetylated phenylalanine at position 1
  Misc feature (9)..(10): Azetidine is between residues 9 and 10
FEWTPGWYQY

SEQ ID NO: 412 - protein, 10 aa, Artificial sequence
  Synthetic peptide
  Acetylation (1)..(1): Acetylated phenylalanine at position 1
  Misc feature (9)..(10): Azetidine is between residues 9 and 10
FEWTPGYYQY

SEQ ID NO: 413 - protein, 10 aa, Artificial sequence
  Synthetic peptide
  Acetylation (1)..(1): Acetylated phenylalanine at position 1
  Misc feature (6)..(6): D-Ala
  Misc feature (9)..(10): Azetidine is between residues 9 and 10
FEWTPAYWQY

SEQ ID NO: 414 - protein, 10 aa, Artificial sequence
  Synthetic peptide
  Acetylation (1)..(1): Acetylated phenylalanine at position 1
  Misc feature (6)..(6): D-Ala
  Misc feature (9)..(10): Azetidine is between residues 9 and 10
FEWTPAWYQY

SEQ ID NO: 415 - protein, 10 aa, Artificial sequence
  Synthetic peptide
  Acetylation (1)..(1): Acetylated phenylalanine at position 1
  Misc feature (6)..(6): D-Ala
  Misc feature (9)..(10): Azetidine is between residues 9 and 10
FEWTPAYYQY

SEQ ID NO: 416 - protein, 14 aa, Artificial sequence
  Synthetic peptide
  Misc feature (2)..(2): Xaa can be any naturally occurring amino acid
  Misc feature (4)..(5): Xaa can be any naturally occurring amino acid
  Misc feature (8)..(8): Xaa can be any naturally occurring amino acid
  Misc feature (11)..(11): Xaa can be any naturally occurring amino acid
  Misc feature (13)..(13): Xaa can be any naturally occurring amino acid
YXCXXGPXTWXCXP

SEQ ID NO: 417 - protein, 14 aa, Artificial sequence
  Synthetic peptide
  Misc feature (2)..(2): Xaa can be any naturally occurring amino acid
  Misc feature (4)..(5): Xaa can be any naturally occurring amino acid
  Misc feature (8)..(8): Xaa can be any naturally occurring amino acid
  Misc feature (11)..(11): Xaa can be any naturally occurring amino acid
  Misc feature (13)..(13): Xaa can be any naturally occurring amino acid
YXCXXGPXTWXCXP

SEQ ID NO: 418 - protein, 14 aa, Artificial sequence
  Synthetic peptide
  Misc feature (2)..(2): Xaa can be any naturally occurring amino acid
  Misc feature (4)..(5): Xaa can be any naturally occurring amino acid
  Misc feature (8)..(8): Xaa can be any naturally occurring amino acid
  Misc feature (11)..(11): Xaa can be any naturally occurring amino acid
  Misc feature (13)..(13): Xaa can be any naturally occurring amino acid
YXCXXGPXTWXCXP

SEQ ID NO: 419 - protein, 14 aa, Artificial sequence
  Synthetic peptide
  Misc feature (2)..(2): Xaa can be any naturally occurring amino acid
  Misc feature (4)..(5): Xaa can be any naturally occurring amino acid
  Misc feature (8)..(8): Xaa can be any naturally occurring amino acid
  Misc feature (11)..(11): Xaa can be any naturally occurring amino acid
  Misc feature (13)..(13): Xaa can be any naturally occurring amino acid
YXCXXGPXTWXCXP

SEQ ID NO: 420 - protein, 20 aa, Artificial sequence
  Synthetic peptide
GGTYSCHFGPLTWVCKPQGG

SEQ ID NO: 421 - protein, 20 aa, Artificial sequence
  Synthetic peptide
GGDYHCRMGPLTWVCKPLGG

SEQ ID NO: 422 - protein, 20 aa, Artificial sequence
  Synthetic peptide
GGVYACRMGPITWVCSPLGG

SEQ ID NO: 423 - protein, 20 aa, Artificial sequence
  Synthetic peptide
VGNYMCHFGPITWVCRPGGG

SEQ ID NO: 424 - protein, 20 aa, Artificial sequence
  Synthetic peptide
GGLYLCRFGPVTWDCGYKGG

SEQ ID NO: 425 - protein, 40 aa, Artificial sequence
  Synthetic peptide
GGTYSCHFGPLTWVCKPQGGGGTYSCHFGPLTWVCKPQGG

SEQ ID NO: 426 - protein, 20 aa, Artificial sequence
  Synthetic peptide
GGTYSCHFGPLTWVCKPQGG

SEQ ID NO: 427 - protein, 23 aa, Artificial sequence
  Synthetic peptide
GGTYSCHFGPLTWVCKPQGGSSK

SEQ ID NO: 428 - protein, 23 aa, Artificial sequence
  Synthetic peptide
GGTYSCHFGPLTWVCKPQGGSSK

SEQ ID NO: 429 - protein, 23 aa, Artificial sequence
  Synthetic peptide
GGTYSCHFGPLTWVCKPQGGSSK

SEQ ID NO: 430 - protein, 22 aa, Artificial sequence
  Synthetic peptide
GGTYSCHFGPLTWVCKPQGGSS

SEQ ID NO: 431 - protein, 23 aa, Artificial sequence
  Synthetic peptide
GGTYSCHFGPLTWVCKPQGGSSK

SEQ ID NO: 432 - protein, 10 aa, Artificial sequence
  Synthetic peptide
  Misc feature (2)..(2): Xaa=Arg, His, Leu or Trp
  Misc feature (3)..(3): Xaa=Met, Phe or Ile
  Misc feature (6)..(6): Xaa=any amino acid
  Misc feature (7)..(7): Xaa=Asp, Glu, Ile, Leu or Val
  Misc feature (9)..(9): Xaa=any amino acid
CXXGPXTWXC

SEQ ID NO: 433 - protein, 19 aa, Artificial sequence
  Synthetic peptide
GGTYSCHGPLTWVCKPQGG

SEQ ID NO: 434 - protein, 19 aa, Artificial sequence
  Synthetic peptide
VGNYMAHMGPITWVCRPGG

SEQ ID NO: 435 - protein, 18 aa, Artificial sequence
  Synthetic peptide
GGPHHVYACRMGPLTWIC

SEQ ID NO: 436 - protein, 18 aa, Artificial sequence
  Synthetic peptide
GGTYSCHFGPLTWVCKPQ

SEQ ID NO: 437 - protein, 20 aa, Artificial sequence
  Synthetic peptide
GGLYACHMGPMTWVCQPLRG

SEQ ID NO: 438 - protein, 22 aa, Artificial sequence
  Synthetic peptide
TIAQYICYMGPETWECRPSPKA

SEQ ID NO: 439 - protein, 13 aa, Artificial sequence
  Synthetic peptide
YSCHFGPLTWVCK

SEQ ID NO: 440 - protein, 11 aa, Artificial sequence
  Synthetic peptide
YCHFGPLTWVC

SEQ ID NO: 441 - protein, 10 aa, Artificial sequence
  Synthetic peptide
  Misc feature (1)..(1): Xaa=Cys, Ala, or nothing
  Misc feature (1)..(2): If residue 1 is not Cys or Ala, alpha-amino-gamma-bromobutyric acid or homocysteine (HOC) is before residue 2
  Misc feature (2)..(2): Xaa=Arg, His, Leu, or Trp
  Misc feature (3)..(3): Xaa=Met, Phe, or Ile
  Misc feature (6)..(6): Xaa=any amino acid
  Misc feature (9)..(9): Xaa=Asp, Glu, Ile, Leu, or Val
  Misc feature (9)..(9): If residue 10 is not Cys or Ala, alpha-amino-gamma-bromobutyric acid or homocysteine (HOC) is after residue 9
  Misc feature (10)..(10): Xaa=Cys, Ala, or nothing
XXXGPXTWXX

SEQ ID NO: 442 - protein, 12 aa, Artificial sequence
  Synthetic peptide
  Misc feature (2)..(2): Xaa=any amino acid
  Misc feature (2)..(3): If residue 3 is not Cys or Ala, alpha-amino-gamma-bromobutyric acid or homocysteine (HOC) is between residues 2 and 3
  Misc feature (3)..(3): Xaa=Cys, Ala, or nothing
  Misc feature (4)..(4): Xaa=Arg, His, Leu, or Trp
  Misc feature (5)..(5): Xaa=Met, Phe, or Ile
  Misc feature (8)..(8): Xaa=any amino acid
  Misc feature (5)..(5): Xaa=Met, Phe, or Ile
  Misc feature (8)..(8): Xaa=any amino acid
  Misc feature (11)..(11): Xaa=Asp, Glu, Ile, Leu, or Val
  Misc feature (11)..(11): If residue 12 is not Cys or Ala, alpha-amino-gamma-bromobutyric acid or homocysteine (HOC) is after residue 11
  Misc feature (12)..(12): Xaa=Cys, Ala, or nothing
YXXXXGPXTWXX

SEQ ID NO: 443 - protein, 16 aa, Artificial sequence
  Synthetic peptide
  Misc feature (1)..(1): Xaa=any amino acid
  Misc feature (3)..(3): Xaa=any amino acid
  Misc feature (3)..(4): If residue 4 is not Cys or Ala, alpha-amino-gamma-bromobutyric acid or homocysteine (HOC) is between residues 3 and 4
  Misc feature (4)..(4): Xaa=Cys, Ala, or nothing
  Misc feature (5)..(5): Xaa=Arg, His, Leu, or Trp
  Misc feature (6)..(6): Xaa=Met, Phe, or Ile
  Misc feature (9)..(9): Xaa=any amino acid
  Misc feature (12)..(12): Xaa=Asp, Glu, Ile, Leu, or Val
  Misc feature (12)..(13): If residue 13 is not Cys or Ala, alpha-amino-gamma-bromobutyric acid or homocysteine (HOC) is between residues 12 and 13
  Misc feature (13)..(13): Xaa=Cys, Ala, or nothing
  Misc feature (14)..(14): Xaa=any amino acid
  Misc feature (15)..(15): Xaa=any amino acid
  Misc feature (16)..(16): Xaa=any amino acid
XYXXXXGPXTWXXXXX

SEQ ID NO: 444 - protein, 16 aa, Artificial sequence
  Synthetic peptide
  Misc feature (1)..(1): Xaa=any amino acid
  Misc feature (3)..(3): Xaa=any amino acid
  Misc feature (5)..(5): Xaa=Arg, His, Leu or Trp
  Misc feature (6)..(6): Xaa=Met, Phe or Ile
  Misc feature (9)..(9): Xaa=any amino acid
  Misc feature (12)..(12): Xaa=Asp, Glu, Ile, Leu or Val
  Misc feature (14)..(14): Xaa=any amino acid
  Misc feature (15)..(15): Xaa=any amino acid
  Misc feature (16)..(16): Xaa=any amino acid
XYXCXXGPXTWXCXXX

SEQ ID NO: 445 - protein, 20 aa, Artificial sequence
  Synthetic peptide
GGLYLCRFGPVTWDCGYKGG

SEQ ID NO: 446 - protein, 20 aa, Artificial sequence
  Synthetic peptide
GGTYSCHFGPLTWVCKPQGG

SEQ ID NO: 447 - protein, 20 aa, Artificial sequence
  Synthetic peptide
GGDYHCRMGPLTWVCKPLGG

SEQ ID NO: 448 - protein, 20 aa, Artificial sequence
  Synthetic peptide
VGNYMCHFGPITWVCRPGGG

SEQ ID NO: 449 - protein, 20 aa, Artificial sequence
  Synthetic peptide
GGVYACRMGPITWVCSPLGG

SEQ ID NO: 450 - protein, 19 aa, Artificial sequence
  Synthetic peptide
VGNYMAHMGPITWVCRPGG

SEQ ID NO: 451 - protein, 18 aa, Artificial sequence
  Synthetic peptide
GGTYSCHFGPLTWVCKPQ

SEQ ID NO: 452 - protein, 20 aa, Artificial sequence
  Synthetic peptide
GGLYACHMGPMTWVCQPLRG

SEQ ID NO: 453 - protein, 22 aa, Artificial sequence
  Synthetic peptide
TIAQYICYMGPETWECRPSPKA

SEQ ID NO: 454 - protein, 13 aa, Artificial sequence
  Synthetic peptide
YSCHFGPLTWVCK

SEQ ID NO: 455 - protein, 11 aa, Artificial sequence
  Synthetic peptide
YCHFGPLTWVC

SEQ ID NO: 456 - protein, 12 aa, Artificial sequence
  Synthetic peptide
SCHFGPLTWVCK

SEQ ID NO: 457 - protein, 12 aa, Artificial sequence
  Synthetic peptide
  Misc feature (1)..(1): Xaa=any amino acid except Tyrosine
  Misc feature (1)..(2): If residue 2 is not Cys or Ala, alpha-amino-gamma-bromobutyric acid or homocysteine (HOC)is between residues 1 and 2
  Misc feature (2)..(2): Xaa=Cys, Ala, or nothing
  Misc feature (3)..(3): Xaa= Cys, Ala, alpha-amino-gamma-bromobutyric acid or homocysteine (HOC)
  Misc feature (4)..(4): Xaa=Arg, His, Leu, or Trp
  Misc feature (5)..(5): Xaa=Met, Phe or Ile
  Misc feature (8)..(8): Xaa=any amino acid
  Misc feature (11)..(11): Xaa=Asp, Gly, Ile, Leu, or Val
  Misc feature (11)..(11): If residue 12 is not Cys or Ala, alpha-amino-gamma-bromobutyric acid or homocysteine (HOC)is after residue 11
  Misc feature (12)..(12): Xaa=Cys, Ala, or nothing
XXXXXGPXTWXX

SEQ ID NO: 458 - protein, 17 aa, Artificial sequence
  Synthetic peptide
  Misc feature (1)..(1): Xn=Glu, Gly, Asn, Ser, Asp, Gln, Leu, Tyr, Ala, or nothing
  Misc feature (2)..(2): Xn=Phe, Val, Ala, Lys, Arg, Gly, Ser, Ile, Leu, or nothing
  Misc feature (3)..(3): Xn=His, Gln, Glu, Gly, Asp, Ala, or Val
  Misc feature (4)..(4): Xn=Glu, Gly, Val, Ala, Pro, Asp, Thr, or Met
  Misc feature (6)..(6): Xaa=any amino acid
  Misc feature (7)..(7): Xaa=any amino acid
  Misc feature (11)..(12): If residue 12 is not Cys or Ala, alpha-amino-gamma-bromobutyric acid or homocysteine (HOC)is between residues 11 and 12
  Misc feature (12)..(12): Xaa=Cys, Ala, or nothing
  Misc feature (14)..(14): Xaa=Arg, His, Leu, or Trp
  Misc feature (15)..(15): Xaa=Met, Phe, or Ile
  Misc feature (17)..(17): Xaa=Leu, Ile, Pro, Phe, Met, Gln, or Gly
XXXXCXXGWVGXCXXWX

SEQ ID NO: 459 - protein, 14 aa, Artificial sequence
  Synthetic peptide
IEGPTLRQWLAARA

SEQ ID NO: 460 - protein, 14 aa, Artificial sequence
  Synthetic peptide
IEGPTLRQWLAAKA

SEQ ID NO: 461 - protein, 14 aa, Artificial sequence
  Synthetic peptide
IEGPTLREWLAARA

SEQ ID NO: 462 - protein, 14 aa, Artificial sequence
  Synthetic peptide
IEGPTLRQWLAARA

SEQ ID NO: 463 - protein, 14 aa, Artificial sequence
  Synthetic peptide
IEGPTLRQWLAAKA

SEQ ID NO: 464 - protein, 14 aa, Artificial sequence
  Synthetic peptide
IEGPTLRQCLAARA

SEQ ID NO: 465 - protein, 14 aa, Artificial sequence
  Synthetic peptide
IEGPTLRQWLAARA

SEQ ID NO: 466 - protein, 14 aa, Artificial sequence
  Synthetic peptide
IEGPTLRQWLAARA

SEQ ID NO: 467 - protein, 28 aa, Artificial sequence
  Synthetic peptide
IEGPTLRQCLAARAIEGPTLRQWLAARA

SEQ ID NO: 468 - protein, 28 aa, Artificial sequence
  Synthetic peptide
IEGPTLRQWLAARAIEGPTLRQCLAARA

SEQ ID NO: 469 - protein, 9 aa, Artificial sequence
  Synthetic peptide
  Misc feature (6)..(8): Xaa=any amino acid
VRDQIXXXL

SEQ ID NO: 470 - protein, 6 aa, Artificial sequence
  Synthetic peptide
TLREWL

SEQ ID NO: 471 - protein, 10 aa, Artificial sequence
  Synthetic peptide
GRVRDQVAGW

SEQ ID NO: 472 - protein, 10 aa, Artificial sequence
  Synthetic peptide
GRVKDQIAQL

SEQ ID NO: 473 - protein, 10 aa, Artificial sequence
  Synthetic peptide
GVRDQVSWAL

SEQ ID NO: 474 - protein, 10 aa, Artificial sequence
  Synthetic peptide
ESVREQVMKY

SEQ ID NO: 475 - protein, 10 aa, Artificial sequence
  Synthetic peptide
SVRSQISASL

SEQ ID NO: 476 - protein, 10 aa, Artificial sequence
  Synthetic peptide
GVRETVYRHM

SEQ ID NO: 477 - protein, 11 aa, Artificial sequence
  Synthetic peptide
GVREVIVMHML

SEQ ID NO: 478 - protein, 11 aa, Artificial sequence
  Synthetic peptide
GRVRDQIWAAL

SEQ ID NO: 479 - protein, 11 aa, Artificial sequence
  Synthetic peptide
AGVRDQILIWL

SEQ ID NO: 480 - protein, 11 aa, Artificial sequence
  Synthetic peptide
GRVRDQIMLSL

SEQ ID NO: 481 - protein, 11 aa, Artificial sequence
  Synthetic peptide
  Misc feature (8)..(10): Xaa=any amino acid
GRVRDQIXXXL

SEQ ID NO: 482 - protein, 10 aa, Artificial sequence
  Synthetic peptide
CTLRQWLQGC

SEQ ID NO: 483 - protein, 10 aa, Artificial sequence
  Synthetic peptide
CTLQEFLEGC

SEQ ID NO: 484 - protein, 10 aa, Artificial sequence
  Synthetic peptide
CTRTEWLHGC

SEQ ID NO: 485 - protein, 12 aa, Artificial sequence
  Synthetic peptide
CTLREWLHGGFC

SEQ ID NO: 486 - protein, 12 aa, Artificial sequence
  Synthetic peptide
CTLREWVFAGLC

SEQ ID NO: 487 - protein, 13 aa, Artificial sequence
  Synthetic peptide
CTLRQWLILLGMC

SEQ ID NO: 488 - protein, 14 aa, Artificial sequence
  Synthetic peptide
CTLAEFLASGVEQC

SEQ ID NO: 489 - protein, 14 aa, Artificial sequence
  Synthetic peptide
CSLQEFLSHGGYVC

SEQ ID NO: 490 - protein, 14 aa, Artificial sequence
  Synthetic peptide
CTLREFLDPTTAVC

SEQ ID NO: 491 - protein, 14 aa, Artificial sequence
  Synthetic peptide
CTLKEWLVSHEVWC

SEQ ID NO: 492 - protein, 14 aa, Artificial sequence
  Synthetic peptide
  Misc feature (8)..(11): Xaa=any amino acid or nothing
  Misc feature (12)..(13): Xaa=any amino acid
CTLREWLXXXXXXC

SEQ ID NO: 493 - protein, 10 aa, Artificial sequence
  Synthetic peptide
REGPTLRQWM

SEQ ID NO: 494 - protein, 10 aa, Artificial sequence
  Synthetic peptide
EGPTLRQWLA

SEQ ID NO: 495 - protein, 10 aa, Artificial sequence
  Synthetic peptide
ERGPFWAKAC

SEQ ID NO: 496 - protein, 10 aa, Artificial sequence
  Synthetic peptide
REGPRCVMWM

SEQ ID NO: 497 - protein, 14 aa, Artificial sequence
  Synthetic peptide
CGTEGPTLSTWLDC

SEQ ID NO: 498 - protein, 14 aa, Artificial sequence
  Synthetic peptide
CEQDGPTLLEWLKC

SEQ ID NO: 499 - protein, 14 aa, Artificial sequence
  Synthetic peptide
CELVGPSLMSWLTC

SEQ ID NO: 500 - protein, 14 aa, Artificial sequence
  Synthetic peptide
CLTGPFVTQWLYEC

SEQ ID NO: 501 - protein, 14 aa, Artificial sequence
  Synthetic peptide
CRAGPTLLEWLTLC

SEQ ID NO: 502 - protein, 14 aa, Artificial sequence
  Synthetic peptide
CADGPTLREWISFC

SEQ ID NO: 503 - protein, 15 aa, Artificial sequence
  Synthetic peptide
  Misc feature (2)..(2): Xaa=any amino acid or nothing
  Misc feature (3)..(3): Xaa=any amino acid
  Misc feature (13)..(13): Xaa=any amino acid or nothing
  Misc feature (14)..(14): Xaa=any amino acid
CXXEGPTLREWLXXC

SEQ ID NO: 504 - protein, 16 aa, Artificial sequence
  Synthetic peptide
GGCTLREWLHGGFCGG

SEQ ID NO: 505 - protein, 18 aa, Artificial sequence
  Synthetic peptide
GGCADGPTLREWISFCGG

SEQ ID NO: 506 - protein, 19 aa, Artificial sequence
  Synthetic peptide
GNADGPTLRQWLEGRRPKN

SEQ ID NO: 507 - protein, 19 aa, Artificial sequence
  Synthetic peptide
LAIEGPTLRQWLHGNGRDT

SEQ ID NO: 508 - protein, 19 aa, Artificial sequence
  Synthetic peptide
HGRVGPTLREWKTQVATKK

SEQ ID NO: 509 - protein, 18 aa, Artificial sequence
  Synthetic peptide
TIKGPTLRQWLKSREHTS

SEQ ID NO: 510 - protein, 18 aa, Artificial sequence
  Synthetic peptide
ISDGPTLKEWLSVTRGAS

SEQ ID NO: 511 - protein, 18 aa, Artificial sequence
  Synthetic peptide
SIEGPTLREWLTSRTPHS

SEQ ID NO: 512 - protein, 5 aa, Artificial sequence
  Synthetic peptide
EEDCK

SEQ ID NO: 513 - protein, 5 aa, Artificial sequence
  Synthetic peptide
  Misc feature (1)..(5): Dimeric peptide
EEDCK

SEQ ID NO: 514 - protein, 4 aa, Artificial sequence
  Synthetic peptide
  Misc feature (3)..(4): Non-amino acid moiety between residues 3 and 4
EEDK

SEQ ID NO: 515 - protein, 4 aa, Artificial sequence
  Synthetic peptide
  Misc feature (1)..(5): Dimeric peptide
  Misc feature (3)..(4): Non-amino acid moiety between residues 3 and 4
EEDK

SEQ ID NO: 516 - protein, 4 aa, Artificial sequence
  Synthetic peptide
  Phosphorylation (1)..(1): Phosphorylated Glu at position 1
  Misc feature (3)..(4): Non-amino acid moiety between residues 3 and 4
EEDK

SEQ ID NO: 517 - protein, 4 aa, Artificial sequence
  Synthetic peptide
  Phosphorylation (1)..(1): Phosphorylated Glu at position 1
  Misc feature (1)..(4): Dimeric peptide
  Misc feature (3)..(4): Non-amino acid moiety between residues 3 and 4
EEDK

SEQ ID NO: 518 - protein, 3 aa, Artificial sequence
  Synthetic peptide
  Misc feature (1)..(1): Pipecolic acid is before residue 1
  Misc feature (2)..(3): Non-amino acid moiety between residues 2 and 3
SDK

SEQ ID NO: 519 - protein, 3 aa, Artificial sequence
  Synthetic peptide
  MISC FEATURE (1)..(1): Pipecolic acid is before residue 1
  MISC FEATURE (1)..(3): Dimeric peptide
  MISC FEATURE (2)..(3): Non-amino acid moiety between residues 2 and 3
SDK

SEQ ID NO: 520 - protein, 5 aa, Artificial sequence
  Synthetic peptide
  MISC FEATURE (1)..(5): Dimeric peptide
  MISC FEATURE (5)..(5): Non-amino acid moiety after residue 5
EEDCK

SEQ ID NO: 521 - protein, 5 aa, Artificial sequence
  Synthetic peptide
  MISC FEATURE (1)..(5): Dimeric peptide
  MISC FEATURE (4)..(4): Xaa = any amino acid
  MISC FEATURE (5)..(5): Non-amino acid moiety after residue 5
EEDXK

SEQ ID NO: 522 - protein, 11 aa, Artificial sequence
  Synthetic peptide
YCFTASENHCY

SEQ ID NO: 523 - protein, 11 aa, Artificial sequence
  Synthetic peptide
YCFTNSENHCY

SEQ ID NO: 524 - protein, 11 aa, Artificial sequence
  Synthetic peptide
YCFTRSENHCY

SEQ ID NO: 525 - protein, 9 aa, Artificial sequence
  Synthetic peptide
FCASENHCY

SEQ ID NO: 526 - protein, 9 aa, Artificial sequence
  Synthetic peptide
YCASENHCY

SEQ ID NO: 527 - protein, 9 aa, Artificial sequence
  Synthetic peptide
FCNSENHCY

SEQ ID NO: 528 - protein, 9 aa, Artificial sequence
  Synthetic peptide
FCNSENRCY

SEQ ID NO: 529 - protein, 10 aa, Artificial sequence
  Synthetic peptide
FCNSVENRCY

SEQ ID NO: 530 - protein, 11 aa, Artificial sequence
  Synthetic peptide
YCSQSVSNDCF

SEQ ID NO: 531 - protein, 9 aa, Artificial sequence
  Synthetic peptide
FCVSNDRCY

SEQ ID NO: 532 - protein, 11 aa, Artificial sequence
  Synthetic peptide
YCRKELGQVCY

SEQ ID NO: 533 - protein, 9 aa, Artificial sequence
  Synthetic peptide
YCKEPGQCY

SEQ ID NO: 534 - protein, 9 aa, Artificial sequence
  Synthetic peptide
YCRKEMGCY

SEQ ID NO: 535 - protein, 9 aa, Artificial sequence
  Synthetic peptide
FCRKEMGCY

SEQ ID NO: 536 - protein, 9 aa, Artificial sequence
  Synthetic peptide
YCWSQNLCY

SEQ ID NO: 537 - protein, 10 aa, Artificial sequence
  Synthetic peptide
YCELSQYLCY

SEQ ID NO: 538 - protein, 9 aa, Artificial sequence
  Synthetic peptide
YCWSQNYCY

SEQ ID NO: 539 - protein, 9 aa, Artificial sequence
  Synthetic peptide
YCWSQYLCY

SEQ ID NO: 540 - protein, 15 aa, Artificial sequence
  Synthetic peptide
DFLPHYKNTSLGHRP

SEQ ID NO: 541 - protein, 7 aa, Artificial sequence
  Synthetic peptide
  Misc feature (2)..(2): Xaa=any amino acid
  Misc feature (5)..(5): Xaa=any amino acid
  Misc feature (7)..(7): Xaa=any amino acid
RXETXWX

SEQ ID NO: 542 - protein, 7 aa, Artificial sequence
  Synthetic peptide
  Misc feature (2)..(2): Xaa=any amino acid
  Misc feature (5)..(5): Xaa=any amino acid
  Misc feature (7)..(7): Xaa=any amino acid
RXETXWX

SEQ ID NO: 543 - protein, 5 aa, Artificial sequence
  Synthetic peptide
  Misc feature (5)..(5): Xaa=any amino acid
RGDGX

SEQ ID NO: 544 - protein, 7 aa, Artificial sequence
  Synthetic peptide
  Misc feature (6)..(6): Xaa=any amino acid
CRGDGXC

SEQ ID NO: 545 - protein, 9 aa, Artificial sequence
  Synthetic peptide
  Misc feature (2)..(3): Xaa=any amino acid
  Misc feature (7)..(8): Xaa=any amino acid
CXXRLDXXC

SEQ ID NO: 546 - protein, 9 aa, Artificial sequence
  Synthetic peptide
CARRLDAPC

SEQ ID NO: 547 - protein, 9 aa, Artificial sequence
  Synthetic peptide
CPSRLDSPC

SEQ ID NO: 548 - protein, 9 aa, Artificial sequence
  Synthetic peptide
  Misc feature (1)..(3): Xaa=any amino acid
  Misc feature (7)..(9): Xaa=any amino acid
XXXRGDXXX

SEQ ID NO: 549 - protein, 9 aa, Artificial sequence
  Synthetic peptide
  Misc feature (2)..(2): Xaa=any amino acid
  Misc feature (8)..(8): Xaa=any amino acid
CXCRGDCXC

SEQ ID NO: 550 - protein, 9 aa, Artificial sequence
  Synthetic peptide
CDCRGDCFC

SEQ ID NO: 551 - protein, 9 aa, Artificial sequence
  Synthetic peptide
CDCRGDCLC

SEQ ID NO: 552 - protein, 9 aa, Artificial sequence
  Synthetic peptide
CLCRGDCIC

SEQ ID NO: 553 - protein, 16 aa, Artificial sequence
  Synthetic peptide
  Misc feature (1)..(2): Xaa=any amino acid
  Misc feature (5)..(7): Xaa=any amino acid
  Misc feature (8)..(11): Xaa=any amino acid or nothing
  Misc feature (12)..(12): Xaa=any amino acid
  Misc feature (13)..(16): Xaa=any amino acid or nothing
XXDDXXXXXXXXXXXX

SEQ ID NO: 554 - protein, 19 aa, Artificial sequence
  Synthetic peptide
  Misc feature (1)..(3): Xaa=any amino acid
  Misc feature (6)..(9): Xaa=any amino acid
  Misc feature (10)..(13): Xaa=any amino acid or nothing
  Misc feature (14)..(14): Xaa=any amino acid
  Misc feature (15)..(19): Xaa=any amino acid or nothing
XXXDDXXXXXXXXXXXXXX

SEQ ID NO: 555 - protein, 8 aa, Artificial sequence
  Synthetic peptide
CWDDGWLC

SEQ ID NO: 556 - protein, 9 aa, Artificial sequence
  Synthetic peptide
CWDDLWWLC

SEQ ID NO: 557 - protein, 8 aa, Artificial sequence
  Synthetic peptide
CWDDGLMC

SEQ ID NO: 558 - protein, 8 aa, Artificial sequence
  Synthetic peptide
CWDDGWMC

SEQ ID NO: 559 - protein, 9 aa, Artificial sequence
  Synthetic peptide
CSWDDGWLC

SEQ ID NO: 560 - protein, 9 aa, Artificial sequence
  Synthetic peptide
CPDDLWWLC

SEQ ID NO: 561 - protein, 13 aa, Artificial sequence
  Synthetic peptide
CGRECPRLCQSSC

SEQ ID NO: 562 - protein, 13 aa, Artificial sequence
  Synthetic peptide
CNGRCVSGCAGRC

SEQ ID NO: 563 - protein, 8 aa, Artificial sequence
  Synthetic peptide
CLSGSLSC

SEQ ID NO: 564 - protein, 6 aa, Artificial sequence
  Synthetic peptide
NGRAHA

SEQ ID NO: 565 - protein, 5 aa, Artificial sequence
  Synthetic peptide
CNGRC

SEQ ID NO: 566 - protein, 9 aa, Artificial sequence
  Synthetic peptide
CDCRGDCFC

SEQ ID NO: 567 - protein, 7 aa, Artificial sequence
  Synthetic peptide
CGSLVRC

SEQ ID NO: 568 - protein, 5 aa, Artificial sequence
  Synthetic peptide
  Misc feature (3)..(4): Xaa=any amino acid
DLXXL

SEQ ID NO: 569 - protein, 12 aa, Artificial sequence
  Synthetic peptide
RTDLDSLRTYTL

SEQ ID NO: 570 - protein, 10 aa, Artificial sequence
  Synthetic peptide
RTDLDSLRTY

SEQ ID NO: 571 - protein, 9 aa, Artificial sequence
  Synthetic peptide
RTDLDSLRT

SEQ ID NO: 572 - protein, 8 aa, Artificial sequence
  Synthetic peptide
RTDLDSLR

SEQ ID NO: 573 - protein, 12 aa, Artificial sequence
  Synthetic peptide
GDLDLLKLRLTL

SEQ ID NO: 574 - protein, 12 aa, Artificial sequence
  Synthetic peptide
GDLHSLRQLLSR

SEQ ID NO: 575 - protein, 12 aa, Artificial sequence
  Synthetic peptide
RDDLHMLRLQLW

SEQ ID NO: 576 - protein, 12 aa, Artificial sequence
  Synthetic peptide
SSDLHALKKRYG

SEQ ID NO: 577 - protein, 12 aa, Artificial sequence
  Synthetic peptide
RGDLKQLSELTW

SEQ ID NO: 578 - protein, 12 aa, Artificial sequence
  Synthetic peptide
RGDLAALSAPPV

SEQ ID NO: 579 - protein, 12 aa, Artificial sequence
  Synthetic peptide
DITWDQLWDLMK

SEQ ID NO: 580 - protein, 12 aa, Artificial sequence
  Synthetic peptide
DITWDELWKIMN

SEQ ID NO: 581 - protein, 12 aa, Artificial sequence
  Synthetic peptide
DYTWFELWDMMQ

SEQ ID NO: 582 - protein, 12 aa, Artificial sequence
  Synthetic peptide
QITWAQLWNMMK

SEQ ID NO: 583 - protein, 12 aa, Artificial sequence
  Synthetic peptide
DMTWHDLWTLMS

SEQ ID NO: 584 - protein, 12 aa, Artificial sequence
  Synthetic peptide
DYSWHDLWEMMS

SEQ ID NO: 585 - protein, 12 aa, Artificial sequence
  Synthetic peptide
EITWDQLWEVMN

SEQ ID NO: 586 - protein, 12 aa, Artificial sequence
  Synthetic peptide
HVSWEQLWDIMN

SEQ ID NO: 587 - protein, 12 aa, Artificial sequence
  Synthetic peptide
HITWDQLWRIMT

SEQ ID NO: 588 - protein, 13 aa, Artificial sequence
  Synthetic peptide
RNMSWLELWEHMK

SEQ ID NO: 589 - protein, 18 aa, Artificial sequence
  Synthetic peptide
AEWTWDQLWHVMNPAESQ

SEQ ID NO: 590 - protein, 14 aa, Artificial sequence
  Synthetic peptide
HRAEWLALWEQMSP

SEQ ID NO: 591 - protein, 14 aa, Artificial sequence
  Synthetic peptide
KKEDWLALWRIMSV

SEQ ID NO: 592 - protein, 11 aa, Artificial sequence
  Synthetic peptide
ITWDQLWDLMK

SEQ ID NO: 593 - protein, 12 aa, Artificial sequence
  Synthetic peptide
DITWDQLWDLMK

SEQ ID NO: 594 - protein, 12 aa, Artificial sequence
  Synthetic peptide
DITWDQLWDLMK

SEQ ID NO: 595 - protein, 12 aa, Artificial sequence
  Synthetic peptide
DITWDQLWDLMK

SEQ ID NO: 596 - protein, 16 aa, Artificial sequence
  Synthetic peptide
CQNRYTDLVAIQNKNE

SEQ ID NO: 597 - protein, 17 aa, Artificial sequence
  Synthetic peptide
AENWADNEPNNKRNNED

SEQ ID NO: 598 - protein, 19 aa, Artificial sequence
  Synthetic peptide
RKNNKTWTWVGTKKALTNE

SEQ ID NO: 599 - protein, 13 aa, Artificial sequence
  Synthetic peptide
KKALTNEAENWAD

SEQ ID NO: 600 - protein, 16 aa, Artificial sequence
  Synthetic peptide
  Misc feature (3)..(3): Xaa=any amino acid
  Misc feature (15)..(15): Xaa=any amino acid
CQXRYTDLVAIQNKXE

SEQ ID NO: 601 - protein, 19 aa, Artificial sequence
  Synthetic peptide
  Misc feature (3)..(3): Xaa=any amino acid
  Misc feature (5)..(6): Xaa=any amino acid
  Misc feature (13)..(13): Xaa=any amino acid
  Misc feature (15)..(15): Xaa=any amino acid
RKXNXXWTWVGTXKXLTEE

SEQ ID NO: 602 - protein, 17 aa, Artificial sequence
  Synthetic peptide
  Misc feature (13)..(13): Xaa=any amino acid
  Misc feature (15)..(15): Xaa=any amino acid
AENWADGEPNNKXNXED

SEQ ID NO: 603 - protein, 16 aa, Artificial sequence
  Synthetic peptide
  Misc feature (2)..(4): Xaa=any amino acid
  Misc feature (7)..(7): Xaa=any amino acid
  Misc feature (15)..(15): Xaa=any amino acid
CXXXYTXLVAIQNKXE

SEQ ID NO: 604 - protein, 19 aa, Artificial sequence
  Synthetic peptide
  Misc feature (3)..(6): Xaa=any amino acid
  Misc feature (8)..(8): Xaa=any amino acid
  Misc feature (13)..(13): Xaa=any amino acid
  Misc feature (15)..(15): Xaa=any amino acid
  Misc feature (18)..(18): Xaa=any amino acid
RKXXXXWXWVGTXKXLTXE

SEQ ID NO: 605 - protein, 16 aa, Artificial sequence
  Synthetic peptide
  Misc feature (2)..(2): Xaa=any amino acid
  Misc feature (5)..(7): Xaa=any amino acid
  Misc feature (12)..(14): Xaa=any amino acid
AXNWXXXEPNNXXXED

SEQ ID NO: 606 - protein, 13 aa, Artificial sequence
  Synthetic peptide
  Misc feature (1)..(1): Xaa=any amino acid
  Misc feature (3)..(3): Xaa=any amino acid
  Misc feature (6)..(6): Xaa=any amino acid
  Misc feature (9)..(9): Xaa=any amino acid
  Misc feature (12)..(13): Xaa=any amino acid
XKXKTXEAXNWXX

SEQ ID NO: 607 - protein, 33 aa, Artificial sequence
  Synthetic peptide
GFFALIPKIISSPLFKTLLSAVGSALSSSGGQQ

SEQ ID NO: 608 - protein, 33 aa, Artificial sequence
  Synthetic peptide
GFFALIPKIISSPLFKTLLSAVGSALSSSGGQE

SEQ ID NO: 609 - protein, 22 aa, Artificial sequence
  Synthetic peptide
GFFALIPKIISSPLFKTLLSAV

SEQ ID NO: 610 - protein, 22 aa, Artificial sequence
  Synthetic peptide
GFFALIPKIISSPLFKTLLSAV

SEQ ID NO: 611 - protein, 23 aa, Artificial sequence
  Synthetic peptide
KGFFALIPKIISSPLFKTLLSAV

SEQ ID NO: 612 - protein, 24 aa, Artificial sequence
  Synthetic peptide
KKGFFALIPKIISSPLFKTLLSAV

SEQ ID NO: 613 - protein, 24 aa, Artificial sequence
  Synthetic peptide
KKGFFALIPKIISSPLFKTLLSAV

SEQ ID NO: 614 - protein, 11 aa, Artificial sequence
  Synthetic peptide
GFFALIPKIIS

SEQ ID NO: 615 - protein, 26 aa, Artificial sequence
  Synthetic peptide
GIGAVLKVLTTGLPALISWIKRKRQQ

SEQ ID NO: 616 - protein, 26 aa, Artificial sequence
  Synthetic peptide
GIGAVLKVLTTGLPALISWIKRKRQQ

SEQ ID NO: 617 - protein, 26 aa, Artificial sequence
  Synthetic peptide
GIGAVLKVLTTGLPALISWIKRKRQQ

SEQ ID NO: 618 - protein, 22 aa, Artificial sequence
  Synthetic peptide
GIGAVLKVLTTGLPALISWIKR

SEQ ID NO: 619 - protein, 19 aa, Artificial sequence
  Synthetic peptide
AVLKVLTTGLPALISWIKR

SEQ ID NO: 620 - protein, 12 aa, Artificial sequence
  Synthetic peptide
KLLLLLKLLLLK

SEQ ID NO: 621 - protein, 12 aa, Artificial sequence
  Synthetic peptide
KLLLKLLLKLLK

SEQ ID NO: 622 - protein, 12 aa, Artificial sequence
  Synthetic peptide
KLLLKLKLKLLK

SEQ ID NO: 623 - protein, 12 aa, Artificial sequence
  Synthetic peptide
KKLLKLKLKLKK

SEQ ID NO: 624 - protein, 12 aa, Artificial sequence
  Synthetic peptide
KLLLKLLLKLLK

SEQ ID NO: 625 - protein, 12 aa, Artificial sequence
  Synthetic peptide
KLLLKLKLKLLK

SEQ ID NO: 626 - protein, 6 aa, Artificial sequence
  Synthetic peptide
KLLLLK

SEQ ID NO: 627 - protein, 8 aa, Artificial sequence
  Synthetic peptide
KLLLKLLK

SEQ ID NO: 628 - protein, 12 aa, Artificial sequence
  Synthetic peptide
KLLLKLKLKLLK

SEQ ID NO: 629 - protein, 12 aa, Artificial sequence
  Synthetic peptide
KLLLKLKLKLLK

SEQ ID NO: 630 - protein, 12 aa, Artificial sequence
  Synthetic peptide
KLLLKLKLKLLK

SEQ ID NO: 631 - protein, 12 aa, Artificial sequence
  Synthetic peptide
KAAAKAAAKAAK

SEQ ID NO: 632 - protein, 12 aa, Artificial sequence
  Synthetic peptide
KVVVKVVVKVVK

SEQ ID NO: 633 - protein, 12 aa, Artificial sequence
  Synthetic peptide
KVVVKVKVKVVK

SEQ ID NO: 634 - protein, 11 aa, Artificial sequence
  Synthetic peptide
KVVVKVKVKVK

SEQ ID NO: 635 - protein, 12 aa, Artificial sequence
  Synthetic peptide
KVVVKVKVKVVK

SEQ ID NO: 636 - protein, 6 aa, Artificial sequence
  Synthetic peptide
KLILKL

SEQ ID NO: 637 - protein, 6 aa, Artificial sequence
  Synthetic peptide
KVLHLL

SEQ ID NO: 638 - protein, 6 aa, Artificial sequence
  Synthetic peptide
LKLRLL

SEQ ID NO: 639 - protein, 6 aa, Artificial sequence
  Synthetic peptide
KPLHLL

SEQ ID NO: 640 - protein, 8 aa, Artificial sequence
  Synthetic peptide
KLILKLVR

SEQ ID NO: 641 - protein, 8 aa, Artificial sequence
  Synthetic peptide
KVFHLLHL

SEQ ID NO: 642 - protein, 8 aa, Artificial sequence
  Synthetic peptide
HKFRILKL

SEQ ID NO: 643 - protein, 8 aa, Artificial sequence
  Synthetic peptide
KPFHILHL

SEQ ID NO: 644 - protein, 12 aa, Artificial sequence
  Synthetic peptide
KIIIKIKIKIIK

SEQ ID NO: 645 - protein, 12 aa, Artificial sequence
  Synthetic peptide
KIIIKIKIKIIK

SEQ ID NO: 646 - protein, 12 aa, Artificial sequence
  Synthetic peptide
KIIIKIKIKIIK

SEQ ID NO: 647 - protein, 12 aa, Artificial sequence
  Synthetic peptide
KIPIKIKIKIPK

SEQ ID NO: 648 - protein, 12 aa, Artificial sequence
  Synthetic peptide
KIPIKIKIKIVK

SEQ ID NO: 649 - protein, 12 aa, Artificial sequence
  Synthetic peptide
RIIIRIRIRIIR

SEQ ID NO: 650 - protein, 12 aa, Artificial sequence
  Synthetic peptide
RIIIRIRIRIIR

SEQ ID NO: 651 - protein, 12 aa, Artificial sequence
  Synthetic peptide
RIIIRIRIRIIR

SEQ ID NO: 652 - protein, 12 aa, Artificial sequence
  Synthetic peptide
RIVIRIRIRLIR

SEQ ID NO: 653 - protein, 12 aa, Artificial sequence
  Synthetic peptide
RIIVRIRLRIIR

SEQ ID NO: 654 - protein, 12 aa, Artificial sequence
  Synthetic peptide
RIGIRLRVRIIR

SEQ ID NO: 655 - protein, 12 aa, Artificial sequence
  Synthetic peptide
KIVIRIRIRLIR

SEQ ID NO: 656 - protein, 12 aa, Artificial sequence
  Synthetic peptide
RIAVKWRLRFIK

SEQ ID NO: 657 - protein, 12 aa, Artificial sequence
  Synthetic peptide
KIGWKLRVRIIR

SEQ ID NO: 658 - protein, 12 aa, Artificial sequence
  Synthetic peptide
KKIGWLIIRVRR

SEQ ID NO: 659 - protein, 14 aa, Artificial sequence
  Synthetic peptide
RIVIRIRIRLIRIR

SEQ ID NO: 660 - protein, 14 aa, Artificial sequence
  Synthetic peptide
RIIVRIRLRIIRVR

SEQ ID NO: 661 - protein, 14 aa, Artificial sequence
  Synthetic peptide
RIGIRLRVRIIRRV

SEQ ID NO: 662 - protein, 16 aa, Artificial sequence
  Synthetic peptide
KIVIRIRARLIRIRIR

SEQ ID NO: 663 - protein, 16 aa, Artificial sequence
  Synthetic peptide
RIIVKIRLRIIKKIRL

SEQ ID NO: 664 - protein, 16 aa, Artificial sequence
  Synthetic peptide
KIGIKARVRIIRVKII

SEQ ID NO: 665 - protein, 16 aa, Artificial sequence
  Synthetic peptide
RIIVHIRLRIIHHIRL

SEQ ID NO: 666 - protein, 16 aa, Artificial sequence
  Synthetic peptide
HIGIKAHVRIIRVHII

SEQ ID NO: 667 - protein, 16 aa, Artificial sequence
  Synthetic peptide
RIYVKIHLRYIKKIRL

SEQ ID NO: 668 - protein, 16 aa, Artificial sequence
  Synthetic peptide
KIGHKARVHIIRYKII

SEQ ID NO: 669 - protein, 16 aa, Artificial sequence
  Synthetic peptide
RIYVKPHPRYIKKIRL

SEQ ID NO: 670 - protein, 16 aa, Artificial sequence
  Synthetic peptide
KPGHKARPHIIRYKII

SEQ ID NO: 671 - protein, 19 aa, Artificial sequence
  Synthetic peptide
KIVIRIRIRLIRIRIRKIV

SEQ ID NO: 672 - protein, 19 aa, Artificial sequence
  Synthetic peptide
RIIVKIRLRIIKKIRLIKK

SEQ ID NO: 673 - protein, 19 aa, Artificial sequence
  Synthetic peptide
KIGWKLRVRIIRVKIGRLR

SEQ ID NO: 674 - protein, 25 aa, Artificial sequence
  Synthetic peptide
KIVIRIRIRLIRIRIRKIVKVKRIR

SEQ ID NO: 675 - protein, 26 aa, Artificial sequence
  Synthetic peptide
RFAVKIRLRIIKKIRLIKKIRKRVIK

SEQ ID NO: 676 - protein, 30 aa, Artificial sequence
  Synthetic peptide
KAGWKLRVRIIRVKIGRLRKIGWKKRVRIK

SEQ ID NO: 677 - protein, 16 aa, Artificial sequence
  Synthetic peptide
RIYVKPHPRYIKKIRL

SEQ ID NO: 678 - protein, 16 aa, Artificial sequence
  Synthetic peptide
KPGHKARPHIIRYKII

SEQ ID NO: 679 - protein, 19 aa, Artificial sequence
  Synthetic peptide
KIVIRIRIRLIRIRIRKIV

SEQ ID NO: 680 - protein, 19 aa, Artificial sequence
  Synthetic peptide
RIIVKIRLRIIKKIRLIKK

SEQ ID NO: 681 - protein, 16 aa, Artificial sequence
  Synthetic peptide
RIYVSKISIYIKKIRL

SEQ ID NO: 682 - protein, 19 aa, Artificial sequence
  Synthetic peptide
KIVIFTRIRLTSIRIRSIV

SEQ ID NO: 683 - protein, 16 aa, Artificial sequence
  Synthetic peptide
KPIHKARPTIIRYKMI

SEQ ID NO: 684 - protein, 25 aa, Artificial sequence
  Synthetic peptide
CKGFFALIPKIISSPLFKTLLSAVC

SEQ ID NO: 685 - protein, 26 aa, Artificial sequence
  Synthetic peptide
CKKGFFALIPKIISSPLFKTLLSAVC

SEQ ID NO: 686 - protein, 27 aa, Artificial sequence
  Synthetic peptide
CKKKGFFALIPKIISSPLFKTLLSAVC

SEQ ID NO: 687 - protein, 16 aa, Artificial sequence
  Synthetic peptide
CRIVIRIRIRLIRIRC

SEQ ID NO: 688 - protein, 18 aa, Artificial sequence
  Synthetic peptide
CKPGHKARPHIIRYKIIC

SEQ ID NO: 689 - protein, 28 aa, Artificial sequence
  Synthetic peptide
CRFAVKIRLRIIKKIRLIKKIRKRVIKC

SEQ ID NO: 690 - protein, 13 aa, Artificial sequence
  Synthetic peptide
KLLLKLLLKLLKC

SEQ ID NO: 691 - protein, 12 aa, Artificial sequence
  Synthetic peptide
KLLLKLLLKLLK

SEQ ID NO: 692 - protein, 13 aa, Artificial sequence
  Synthetic peptide
KLLLKLKLKLLKC

SEQ ID NO: 693 - protein, 12 aa, Artificial sequence
  Synthetic peptide
KLLLKLLLKLLK

SEQ ID NO: 694 - protein, 28 aa, Artificial sequence
  Synthetic peptide
HSDAVFYDNYTRLRKQMAVKKYLNSILN

SEQ ID NO: 695 - protein, 29 aa, Artificial sequence
  Synthetic peptide
  Misc feature (1)..(1): Xaa=Norleucine
XHSDAVFYDNYTRLRKQMAVKKYLNSILN

SEQ ID NO: 696 - protein, 11 aa, Artificial sequence
  Synthetic peptide
  Misc feature (1)..(1): Xaa=Ala, Val, Lys, D-Lys, Orn, or nothing
  Misc feature (2)..(2): If residue 1 is Ala, Xaa=Val or nothing; if residue 1 is Val, Xaa=Ala, Lys or nothing; if residue 1 not Ala or Val, Xaa=nothing
  Misc feature (3)..(3): If residue 2 is Val or Ala, Xaa=Lys or nothing; if residue 2 is not Val or Ala, Xaa=nothing
  Misc feature (4)..(4): Xaa=L-Lys, D-Lys, or Orn
  Misc feature (5)..(5): Xaa=L-Tyr, D-Tyr, Phe, Trp, or p-amino phenylalanine
  Misc feature (6)..(6): Xaa=Ala, D-Ala, Ile, D-Ile, Leu, D-Leu, Met, D-Met, Val, D-Val, Nva, D-Nva, Nle, or D-Nle
  Misc feature (7)..(7): Xaa=Asn, Ser, Ile, Tyr, Leu, D-Ala, Nle, or nothing
  Misc feature (8)..(8): If residue 7 is Asn, Xaa=Ser or nothing; if residue 7 is not Asn, Xaa=nothing
  Misc feature (9)..(9): If residue 8 is Ser, Xaa=Ile, Tyr, or nothing; if residue 8 is not Ser, Xaa=nothing
  Misc feature (10)..(10): If residue 9 is Ile or Tyr, Xaa=Leu; if residue 9 is not Ile or Tyr, Xaa=nothing
  Misc feature (11)..(11): If residue 10 is Leu, Xaa=Asn; if residue 10 is not Leu, Xaa=nothing
XXXXXXXXXXX

SEQ ID NO: 697 - protein, 11 aa, Artificial sequence
  Synthetic peptide
  Misc feature (1)..(4): Xaa=Asn, Ala, D-Ala, Ile, D-Ile, Leu, D-Leu, Met, D-Met, Val, D-Val, Nva, D-Nva, Nle, D-Nle, Tyr, Lys, or nothing
  Misc feature (5)..(5): Xaa=Asn, Ala, D-Ala, Ile, D-Ile, Leu, D-Leu, Met, D-Met, Val, D-Val, Nva, D-Nva, Nle, D-Nle, Tyr, or nothing
  Misc feature (6)..(6): Xaa=Ala, D-Ala, Ile, D-Ile, Leu, D-Leu, Met, D-Met, Val, D-Val, Nva, D-Nva, Nle, D-Nle, or nothing
  Misc feature (7)..(7): Xaa=Asn or nothing
  Misc feature (9)..(9): Xaa=Ile or Tyr
XXXXXXXSXLN

SEQ ID NO: 698 - skipped

SEQ ID NO: 699 - protein, 4 aa, Artificial sequence
  Synthetic peptide
KKYL

SEQ ID NO: 700 - protein, 5 aa, Artificial sequence
  Synthetic peptide
NSILN

SEQ ID NO: 701 - protein, 4 aa, Artificial sequence
  Synthetic peptide
KKYL

SEQ ID NO: 702 - protein, 4 aa, Artificial sequence
  Synthetic peptide
KKYA

SEQ ID NO: 703 - protein, 6 aa, Artificial sequence
  Synthetic peptide
AVKKYL

SEQ ID NO: 704 - protein, 5 aa, Artificial sequence
  Synthetic peptide
NSILN

SEQ ID NO: 705 - protein, 4 aa, Artificial sequence
  Synthetic peptide
KKYV

SEQ ID NO: 706 - protein, 3 aa, Artificial sequence
  Synthetic peptide
  Misc feature (2)..(3): A lauroyl moiety is between residues 2 and 3
SIN

SEQ ID NO: 707 - protein, 5 aa, Artificial sequence
  Synthetic peptide
  Misc feature (5)..(5): Xaa=Norleucine
KKYLX

SEQ ID NO: 708 - protein, 5 aa, Artificial sequence
  Synthetic peptide
NSYLN

SEQ ID NO: 709 - protein, 5 aa, Artificial sequence
  Synthetic peptide
NSIYN

SEQ ID NO: 710 - protein, 11 aa, Artificial sequence
  Synthetic peptide
KKYLPPNSILN

SEQ ID NO: 711 - protein, 4 aa, Artificial sequence
  Synthetic peptide
  Binding (1)..(1): A lauroyl moiety is bound to residue 1
KKYL

SEQ ID NO: 712 - protein, 4 aa, Artificial sequence
  Synthetic peptide
  Binding (1)..(1): A caproyl moiety is bound to residue 1
KKYL

SEQ ID NO: 713 - protein, 3 aa, Artificial sequence
  Synthetic peptide
KYL

SEQ ID NO: 714 - protein, 4 aa, Artificial sequence
  Synthetic peptide
  Misc feature (4)..(4): Xaa=Norleucine
KKYX

SEQ ID NO: 715 - protein, 5 aa, Artificial sequence
  Synthetic peptide
VKKYL

SEQ ID NO: 716 - protein, 6 aa, Artificial sequence
  Synthetic peptide
LNSILN

SEQ ID NO: 717 - protein, 7 aa, Artificial sequence
  Synthetic peptide
YLNSILN

SEQ ID NO: 718 - protein, 5 aa, Artificial sequence
  Synthetic peptide
KKYLN

SEQ ID NO: 719 - protein, 6 aa, Artificial sequence
  Synthetic peptide
KKYLNS

SEQ ID NO: 720 - protein, 7 aa, Artificial sequence
  Synthetic peptide
KKYLNSI

SEQ ID NO: 721 - protein, 8 aa, Artificial sequence
  Synthetic peptide
KKYLNSIL

SEQ ID NO: 722 - protein, 4 aa, Artificial sequence
  Synthetic peptide
KKYL

SEQ ID NO: 723 - protein, 5 aa, Artificial sequence
  Synthetic peptide
KKYDA

SEQ ID NO: 724 - protein, 6 aa, Artificial sequence
  Synthetic peptide
AVKKYL

SEQ ID NO: 725 - protein, 5 aa, Artificial sequence
  Synthetic peptide
NSILN

SEQ ID NO: 726 - protein, 4 aa, Artificial sequence
  Synthetic peptide
KKYV

SEQ ID NO: 727 - protein, 3 aa, Artificial sequence
  Synthetic peptide
  Misc feature (2)..(3): A lauroyl moiety is between residues 2 and 3
SIN

SEQ ID NO: 728 - protein, 5 aa, Artificial sequence
  Synthetic peptide
NSYLN

SEQ ID NO: 729 - protein, 5 aa, Artificial sequence
  Synthetic peptide
NSIYN

SEQ ID NO: 730 - protein, 5 aa, Artificial sequence
  Synthetic peptide
  Misc feature (5)..(5): Xaa=Norleucine
KKYLX

SEQ ID NO: 731 - protein, 11 aa, Artificial sequence
  Synthetic peptide
KKYLPPNSILN

SEQ ID NO: 732 - protein, 4 aa, Artificial sequence
  Synthetic peptide
KKYL

SEQ ID NO: 733 - protein, 5 aa, Artificial sequence
  Synthetic peptide
KKYDA

SEQ ID NO: 734 - protein, 6 aa, Artificial sequence
  Synthetic peptide
AVKKYL

SEQ ID NO: 735 - protein, 5 aa, Artificial sequence
  Synthetic peptide
NSILN

SEQ ID NO: 736 - protein, 4 aa, Artificial sequence
  Synthetic peptide
KKYV

SEQ ID NO: 737 - protein, 3 aa, Artificial sequence
  Synthetic peptide
  Misc feature (2)..(3): A lauroyl moiety is between residues 2 and 3
SIN

SEQ ID NO: 738 - protein, 4 aa, Artificial sequence
  Synthetic peptide
  Binding (1)..(1): A lauroyl moiety is bound to residue 1
KKYL

SEQ ID NO: 739 - protein, 4 aa, Artificial sequence
  Synthetic peptide
  Binding (1)..(1): A caproyl moiety is bound to residue 1
KKYL

SEQ ID NO: 740 - protein, 3 aa, Artificial sequence
  Synthetic peptide
KYL

SEQ ID NO: 741 - protein, 3 aa, Artificial sequence
  Synthetic peptide
KYL

SEQ ID NO: 742 - protein, 4 aa, Artificial sequence
  Synthetic peptide
  Misc feature (4)..(4): Xaa=Norleucine
KKYX

SEQ ID NO: 743 - protein, 5 aa, Artificial sequence
  Synthetic peptide
VKKYL

SEQ ID NO: 744 - protein, 6 aa, Artificial sequence
  Synthetic peptide
LNSILN

SEQ ID NO: 745 - protein, 7 aa, Artificial sequence
  Synthetic peptide
YLNSILN

SEQ ID NO: 746 - protein, 5 aa, Artificial sequence
  Synthetic peptide
  Misc feature (5)..(5): Xaa=Norleucine
KKYLX

SEQ ID NO: 747 - protein, 5 aa, Artificial sequence
  Synthetic peptide
KKYLN

SEQ ID NO: 748 - protein, 6 aa, Artificial sequence
  Synthetic peptide
KKYLNS

SEQ ID NO: 749 - protein, 7 aa, Artificial sequence
  Synthetic peptide
KKYLNSI

SEQ ID NO: 750 - protein, 8 aa, Artificial sequence
  Synthetic peptide
KKYLNSIL

SEQ ID NO: 751 - protein, 6 aa, Artificial sequence
  Synthetic peptide
KKKYLD

SEQ ID NO: 752 - protein, 6 aa, Artificial sequence
  Synthetic peptide
CKKYLC

SEQ ID NO: 753 - protein, 6 aa, Artificial sequence
  Synthetic peptide
CKKYLK

SEQ ID NO: 754 - protein, 4 aa, Artificial sequence
  Synthetic peptide
KKYA

SEQ ID NO: 755 - protein, 8 aa, Artificial sequence
  Synthetic peptide
WWTDTGLW

SEQ ID NO: 756 - protein, 8 aa, Artificial sequence
  Synthetic peptide
WWTDDGLW

SEQ ID NO: 757 - protein, 12 aa, Artificial sequence
  Synthetic peptide
WWDTRGLWVWTI

SEQ ID NO: 758 - protein, 12 aa, Artificial sequence
  Synthetic peptide
FWGNDGIWLESG

SEQ ID NO: 759 - protein, 12 aa, Artificial sequence
  Synthetic peptide
DWDQFGLWRGAA

SEQ ID NO: 760 - protein, 12 aa, Artificial sequence
  Synthetic peptide
RWDDNGLWVVVL

SEQ ID NO: 761 - protein, 12 aa, Artificial sequence
  Synthetic peptide
SGMWSHYGIWMG

SEQ ID NO: 762 - protein, 12 aa, Artificial sequence
  Synthetic peptide
GGRWDQAGLWVA

SEQ ID NO: 763 - protein, 12 aa, Artificial sequence
  Synthetic peptide
KLWSEQGIWMGE

SEQ ID NO: 764 - protein, 10 aa, Artificial sequence
  Synthetic peptide
CWSMHGLWLC

SEQ ID NO: 765 - protein, 12 aa, Artificial sequence
  Synthetic peptide
GCWDNTGIWVPC

SEQ ID NO: 766 - protein, 10 aa, Artificial sequence
  Synthetic peptide
DWDTRGLWVY

SEQ ID NO: 767 - protein, 10 aa, Artificial sequence
  Synthetic peptide
SLWDENGAWI

SEQ ID NO: 768 - protein, 10 aa, Artificial sequence
  Synthetic peptide
KWDDRGLWMH

SEQ ID NO: 769 - protein, 10 aa, Artificial sequence
  Synthetic peptide
QAWNERGLWT

SEQ ID NO: 770 - protein, 10 aa, Artificial sequence
  Synthetic peptide
QWDTRGLWVA

SEQ ID NO: 771 - protein, 9 aa, Artificial sequence
  Synthetic peptide
WNVHGIWQE

SEQ ID NO: 772 - protein, 10 aa, Artificial sequence
  Synthetic peptide
SWDTRGLWVE

SEQ ID NO: 773 - protein, 10 aa, Artificial sequence
  Synthetic peptide
DWDTRGLWVA

SEQ ID NO: 774 - protein, 10 aa, Artificial sequence
  Synthetic peptide
SWGRDGLWIE

SEQ ID NO: 775 - protein, 10 aa, Artificial sequence
  Synthetic peptide
EWTDNGLWAL

SEQ ID NO: 776 - protein, 10 aa, Artificial sequence
  Synthetic peptide
SWDEKGLWSA

SEQ ID NO: 777 - protein, 10 aa, Artificial sequence
  Synthetic peptide
SWDSSGLWMD

SEQ ID NO: 778 - protein, 6 aa, Artificial sequence
  Synthetic peptide
TFSDLW

SEQ ID NO: 779 - protein, 12 aa, Artificial sequence
  Synthetic peptide
QETFSDLWKLLP

SEQ ID NO: 780 - protein, 12 aa, Artificial sequence
  Synthetic peptide
QPTFSDLWKLLP

SEQ ID NO: 781 - protein, 12 aa, Artificial sequence
  Synthetic peptide
QETFSDYWKLLP

SEQ ID NO: 782 - protein, 12 aa, Artificial sequence
  Synthetic peptide
QPTFSDYWKLLP

SEQ ID NO: 783 - protein, 12 aa, Artificial sequence
  Synthetic peptide
MPRFMDYWEGLN

SEQ ID NO: 784 - protein, 12 aa, Artificial sequence
  Synthetic peptide
VQNFIDYWTQQF

SEQ ID NO: 785 - protein, 12 aa, Artificial sequence
  Synthetic peptide
TGPAFTHYWATF

SEQ ID NO: 786 - protein, 15 aa, Artificial sequence
  Synthetic peptide
IDRAPTFRDHWFALV

SEQ ID NO: 787 - protein, 15 aa, Artificial sequence
  Synthetic peptide
PRPALVFADYWETLY

SEQ ID NO: 788 - protein, 15 aa, Artificial sequence
  Synthetic peptide
PAFSRFWSDLSAGAH

SEQ ID NO: 789 - protein, 15 aa, Artificial sequence
  Synthetic peptide
PAFSRFWSKLSAGAH

SEQ ID NO: 790 - protein, 10 aa, Artificial sequence
  Synthetic peptide
  Misc feature (2)..(2): Xaa=any amino acid
  Misc feature (4)..(4): Xaa=any amino acid
  Misc feature (8)..(9): Xaa=any amino acid
PXFXDYWXXL

SEQ ID NO: 791 - protein, 12 aa, Artificial sequence
  Synthetic peptide
QETFSDLWKLLP

SEQ ID NO: 792 - protein, 12 aa, Artificial sequence
  Synthetic peptide
QPTFSDLWKLLP

SEQ ID NO: 793 - protein, 12 aa, Artificial sequence
  Synthetic peptide
QETFSDYWKLLP

SEQ ID NO: 794 - protein, 12 aa, Artificial sequence
  Synthetic peptide
QPTFSDYWKLLP

SEQ ID NO: 795 - protein, 13 aa, Artificial sequence
  Synthetic peptide
SCVKWGKKEFCGS

SEQ ID NO: 796 - protein, 12 aa, Artificial sequence
  Synthetic peptide
SCWKYWGKECGS

SEQ ID NO: 797 - protein, 13 aa, Artificial sequence
  Synthetic peptide
SCYEWGKLRWCGS

SEQ ID NO: 798 - protein, 13 aa, Artificial sequence
  Synthetic peptide
SCLRWGKWSNCGS

SEQ ID NO: 799 - protein, 13 aa, Artificial sequence
  Synthetic peptide
SCWRWGKYQICGS

SEQ ID NO: 800 - protein, 13 aa, Artificial sequence
  Synthetic peptide
SCVSWGALKLCGS

SEQ ID NO: 801 - protein, 13 aa, Artificial sequence
  Synthetic peptide
SCIRWGQNTFCGS

SEQ ID NO: 802 - protein, 13 aa, Artificial sequence
  Synthetic peptide
SCWQWGNLKICGS

SEQ ID NO: 803 - protein, 13 aa, Artificial sequence
  Synthetic peptide
SCVRWGQLSICGS

SEQ ID NO: 804 - protein, 21 aa, Artificial sequence
  Synthetic peptide
LKKFNARRKLKGAILTTMLAK

SEQ ID NO: 805 - protein, 18 aa, Artificial sequence
  Synthetic peptide
RRWKKNFIAVSAANRFKK

SEQ ID NO: 806 - protein, 18 aa, Artificial sequence
  Synthetic peptide
RKWQKTGHAVRAIGRLSS

SEQ ID NO: 807 - protein, 14 aa, Artificial sequence
  Synthetic peptide
INLKALAALAKKIL

SEQ ID NO: 808 - protein, 18 aa, Artificial sequence
  Synthetic peptide
KIWSILAPLGTTLVKLVA

SEQ ID NO: 809 - protein, 14 aa, Artificial sequence
  Synthetic peptide
LKKLLKLLKKLLKL

SEQ ID NO: 810 - protein, 18 aa, Artificial sequence
  Synthetic peptide
LKWKKLLKLLKKLLKKLL

SEQ ID NO: 811 - protein, 17 aa, Artificial sequence
  Synthetic peptide
AEWPSLTEIKTLSHFSV

SEQ ID NO: 812 - protein, 17 aa, Artificial sequence
  Synthetic peptide
AEWPSPTRVISTTYFGS

SEQ ID NO: 813 - protein, 17 aa, Artificial sequence
  Synthetic peptide
AELAHWPPVKTVLRSFT

SEQ ID NO: 814 - protein, 17 aa, Artificial sequence
  Synthetic peptide
AEGSWLQLLNLMKQMNN

SEQ ID NO: 815 - protein, 10 aa, Artificial sequence
  Synthetic peptide
AEWPSLTEIK

SEQ ID NO: 816 - protein, 17 aa, Artificial sequence
  Synthetic peptide
SGSGVLKRPLPILPVTR

SEQ ID NO: 817 - protein, 17 aa, Artificial sequence
  Synthetic peptide
RWLSSRPLPPLPLPPRT

SEQ ID NO: 818 - protein, 20 aa, Artificial sequence
  Synthetic peptide
GSGSYDTLALPSLPLHPMSS

SEQ ID NO: 819 - protein, 20 aa, Artificial sequence
  Synthetic peptide
GSGSYDTRALPSLPLHPMSS

SEQ ID NO: 820 - protein, 20 aa, Artificial sequence
  Synthetic peptide
GSGSSGVTMYPKLPPHWSMA

SEQ ID NO: 821 - protein, 20 aa, Artificial sequence
  Synthetic peptide
GSGSSGVRMYPKLPPHWSMA

SEQ ID NO: 822 - protein, 20 aa, Artificial sequence
  Synthetic peptide
GSGSSSMRMVPTIPGSAKHG

SEQ ID NO: 823 - protein, 6 aa, Artificial sequence
  Synthetic peptide
RNRQKT

SEQ ID NO: 824 - protein, 4 aa, Artificial sequence
  Synthetic peptide
RNRQ

SEQ ID NO: 825 - protein, 5 aa, Artificial sequence
  Synthetic peptide
RNRQK

SEQ ID NO: 826 - protein, 5 aa, Artificial sequence
  Synthetic peptide
NRQKT

SEQ ID NO: 827 - protein, 4 aa, Artificial sequence
  Synthetic peptide
RQKT

SEQ ID NO: 828 - protein, 7 aa, Artificial sequence
  Synthetic peptide
RPLPPLP

SEQ ID NO: 829 - protein, 7 aa, Artificial sequence
  Synthetic peptide
RELPPLP

SEQ ID NO: 830 - protein, 7 aa, Artificial sequence
  Synthetic peptide
SPLPPLP

SEQ ID NO: 831 - protein, 7 aa, Artificial sequence
  Synthetic peptide
GPLPPLP

SEQ ID NO: 832 - protein, 7 aa, Artificial sequence
  Synthetic peptide
RPLPIPP

SEQ ID NO: 833 - protein, 7 aa, Artificial sequence
  Synthetic peptide
RPLPIPP

SEQ ID NO: 834 - protein, 7 aa, Artificial sequence
  Synthetic peptide
RRLPPTP

SEQ ID NO: 835 - protein, 7 aa, Artificial sequence
  Synthetic peptide
RQLPPTP

SEQ ID NO: 836 - protein, 7 aa, Artificial sequence
  Synthetic peptide
RPLPSRP

SEQ ID NO: 837 - protein, 7 aa, Artificial sequence
  Synthetic peptide
RPLPTRP

SEQ ID NO: 838 - protein, 7 aa, Artificial sequence
  Synthetic peptide
SRLPPLP

SEQ ID NO: 839 - protein, 7 aa, Artificial sequence
  Synthetic peptide
RALPSPP

SEQ ID NO: 840 - protein, 7 aa, Artificial sequence
  Synthetic peptide
RRLPRTP

SEQ ID NO: 841 - protein, 7 aa, Artificial sequence
  Synthetic peptide
RPVPPIT

SEQ ID NO: 842 - protein, 7 aa, Artificial sequence
  Synthetic peptide
ILAPPVP

SEQ ID NO: 843 - protein, 7 aa, Artificial sequence
  Synthetic peptide
RPLPMLP

SEQ ID NO: 844 - protein, 7 aa, Artificial sequence
  Synthetic peptide
RPLPILP

SEQ ID NO: 845 - protein, 7 aa, Artificial sequence
  Synthetic peptide
RPLPSLP

SEQ ID NO: 846 - protein, 7 aa, Artificial sequence
  Synthetic peptide
RPLPSLP

SEQ ID NO: 847 - protein, 7 aa, Artificial sequence
  Synthetic peptide
RPLPMIP

SEQ ID NO: 848 - protein, 7 aa, Artificial sequence
  Synthetic peptide
RPLPLIP

SEQ ID NO: 849 - protein, 7 aa, Artificial sequence
  Synthetic peptide
RPLPPTP

SEQ ID NO: 850 - protein, 7 aa, Artificial sequence
  Synthetic peptide
RSLPPLP

SEQ ID NO: 851 - protein, 7 aa, Artificial sequence
  Synthetic peptide
RPQPPPP

SEQ ID NO: 852 - protein, 7 aa, Artificial sequence
  Synthetic peptide
RQLPIPP

SEQ ID NO: 853 - protein, 12 aa, Artificial sequence
  Synthetic peptide
  Misc feature (1)..(3): Xaa=any amino acid
  Misc feature (11)..(11): Xaa=any amino acid
XXXRPLPPLPXP

SEQ ID NO: 854 - protein, 12 aa, Artificial sequence
  Synthetic peptide
  Misc feature (1)..(3): Xaa=any amino acid
  Misc feature (11)..(12): Xaa=any amino acid
XXXRPLPPIPXX

SEQ ID NO: 855 - protein, 12 aa, Artificial sequence
  Synthetic peptide
  Misc feature (1)..(3): Xaa=any amino acid
  Misc feature (11)..(12): Xaa=any amino acid
XXXRPLPPLPXX

SEQ ID NO: 856 - protein, 12 aa, Artificial sequence
  Synthetic peptide
  Misc feature (2)..(3): Xaa=any amino acid
  Misc feature (11)..(11): Xaa=any amino acid
RXXRPLPPLPXP

SEQ ID NO: 857 - protein, 12 aa, Artificial sequence
  Synthetic peptide
  Misc feature (2)..(3): Xaa=any amino acid
RXXRPLPPLPPP

SEQ ID NO: 858 - protein, 12 aa, Artificial sequence
  Synthetic peptide
  Misc feature (11)..(12): Xaa=any amino acid
PPPYPPPPIPXX

SEQ ID NO: 859 - protein, 12 aa, Artificial sequence
  Synthetic peptide
  Misc feature (11)..(12): Xaa=any amino acid
PPPYPPPPVPXX

SEQ ID NO: 860 - protein, 10 aa, Artificial sequence
  Synthetic peptide
  Misc feature (2)..(3): Xaa=any amino acid
  Misc feature (8)..(8): Xaa=any amino acid
  Misc feature (9)..(9): Xaa=Ile, Val, Leu, Ala or Pro
LXXRPLPXXP

SEQ ID NO: 861 - protein, 10 aa, Artificial sequence
  Synthetic peptide
  Misc feature (1)..(1): Xaa=Ile, Val, Leu, Ala, or Pro
  Misc feature (2)..(3): Xaa=any amino acid
  Misc feature (8)..(8): Xaa=any amino acid
XXXRPLPXLP

SEQ ID NO: 862 - protein, 10 aa, Artificial sequence
  Synthetic peptide
  Misc feature (3)..(3): Xaa=any amino acid
  Misc feature (4)..(4): Xaa=Phe, Tyr, or Trp
  Misc feature (5)..(5): Xaa=any amino acid
  Misc feature (9)..(9): Xaa=Ile, Val, Leu, Ala, or Pro
PPXXXPPPXP

SEQ ID NO: 863 - protein, 11 aa, Artificial sequence
  Synthetic peptide
  Misc feature (1)..(1): Xaa=His, Lys, or Arg
  Misc feature (4)..(4): Xaa=Ile, Val, Leu, Ala, or Pro
  Misc feature (6)..(6): Xaa=any amino acid
  Misc feature (9)..(9): Xaa=any amino acid
XPPXPXKPXWL

SEQ ID NO: 864 - protein, 11 aa, Artificial sequence
  Synthetic peptide
  Misc feature (3)..(3): Xaa=any amino acid
  Misc feature (4)..(4): Xaa=Ile, Val, Leu, Ala, or Pro
  Misc feature (6)..(6): Xaa=Ile, Val, Leu, Ala, or Pro
  Misc feature (8)..(8): Xaa=His, Lys, or Arg
  Misc feature (10)..(10): Xaa=any amino acid
RPXXPXRXSXP

SEQ ID NO: 865 - protein, 11 aa, Artificial sequence
  Synthetic peptide
  Misc feature (8)..(9): Xaa=any amino acid
PPVPPRPXXTL

SEQ ID NO: 866 - protein, 7 aa, Artificial sequence
  Synthetic peptide
  Misc feature (1)..(1): Xaa=Ile, Val, Leu, Ala, or Pro
  Misc feature (3)..(3): Xaa=Ile, Val, Leu, Ala, or Pro
  Misc feature (6)..(6): Xaa=Ile, Val, Leu, Ala, or Pro
XPXLPXK

SEQ ID NO: 867 - protein, 10 aa, Artificial sequence
  Synthetic peptide
  Misc feature (1)..(1): Xaa=His, Lys, or Arg
  Misc feature (2)..(2): Xaa=Phe, Tyr, or Trp
  Misc feature (4)..(4): Xaa=any amino acid
  Misc feature (8)..(8): Xaa=any amino acid
XXDXPLPXLP

SEQ ID NO: 868 - protein, 17 aa, Artificial sequence
  Synthetic peptide
  Misc feature (1)..(1): Xaa=Asp, Arg, Met, Pro, or Cys
  Misc feature (2)..(2): If residue 1 is Asp, Xaa=Arg; if residue 1 is Arg, Xaa=Met; if residue 1 is Met, Xaa=Pro; if residue 1 is Pro, Xaa=Cys; if residue 1 is Cys, Xaa=nothing
  Misc feature (3)..(3): If residue 1 is Asp, Xaa=Met; if residue 1 is Arg, Xaa=Pro; if residue 1 is Met, Xaa=Cys; if residue 1 is Pro or Cys, Xaa=nothing
  Misc feature (4)..(4): If residue 1 is Asp, Xaa=Pro; if residue 1 is Arg, Xaa=Cys; if residue 1 is Met, Pro, or Cys, Xaa=nothing
  Misc feature (5)..(5): If residue 1 is Asp, Xaa=Cys; if residue 1 is Arg, Met, Pro, or Cys, Xaa=nothing
  Misc feature (6)..(6): Xaa=Arg or Lys
  Misc feature (14)..(14): Xaa=Ser or Thr
  Misc feature (16)..(16): Xaa=Cys
  Misc feature (17)..(17): Xaa=Lys or nothing
XXXXXXNFFWKTFXSXX

SEQ ID NO: 869 - protein, 17 aa, Artificial sequence
  Synthetic peptide
DRMPCRNFFWKTFSSCK

SEQ ID NO: 870 - protein, 15 aa, Artificial sequence
  Synthetic peptide
MPCRNFFWKTFSSCK

SEQ ID NO: 871 - protein, 13 aa, Artificial sequence
  Synthetic peptide
CRNFFWKTFSSCK

SEQ ID NO: 872 - protein, 16 aa, Artificial sequence
  Synthetic peptide
DRMPCRNFFWKTFSSC

SEQ ID NO: 873 - protein, 14 aa, Artificial sequence
  Synthetic peptide
MPCRNFFWKTFSSC

SEQ ID NO: 874 - protein, 12 aa, Artificial sequence
  Synthetic peptide
CRNFFWKTFSSC

SEQ ID NO: 875 - protein, 16 aa, Artificial sequence
  Synthetic peptide
DRMPCKNFFWKTFSSC

SEQ ID NO: 876 - protein, 15 aa, Artificial sequence
  Synthetic peptide
MPCKNFFWKTFSSCK

SEQ ID NO: 877 - protein, 13 aa, Artificial sequence
  Synthetic peptide
CKNFFWKTFSSCK

SEQ ID NO: 878 - protein, 16 aa, Artificial sequence
  Synthetic peptide
DRMPCKNFFWKTFSSC

SEQ ID NO: 879 - protein, 14 aa, Artificial sequence
  Synthetic peptide
MPCKNFFWKTFSSC

SEQ ID NO: 880 - protein, 12 aa, Artificial sequence
  Synthetic peptide
CKNFFWKTFSSC

SEQ ID NO: 881 - protein, 17 aa, Artificial sequence
  Synthetic peptide
DRMPCRNFFWKTFTSCK

SEQ ID NO: 882 - protein, 15 aa, Artificial sequence
  Synthetic peptide
MPCRNFFWKTFTSCK

SEQ ID NO: 883 - protein, 13 aa, Artificial sequence
  Synthetic peptide
CRNFFWKTFTSCK

SEQ ID NO: 884 - protein, 16 aa, Artificial sequence
  Synthetic peptide
DRMPCRNFFWKTFTSC

SEQ ID NO: 885 - protein, 14 aa, Artificial sequence
  Synthetic peptide
MPCRNFFWKTFTSC

SEQ ID NO: 886 - protein, 12 aa, Artificial sequence
  Synthetic peptide
CRNFFWKTFTSC

SEQ ID NO: 887 - protein, 17 aa, Artificial sequence
  Synthetic peptide
DRMPCKNFFWKTFTSCK

SEQ ID NO: 888 - protein, 15 aa, Artificial sequence
  Synthetic peptide
MPCKNFFWKTFTSCK

SEQ ID NO: 889 - protein, 13 aa, Artificial sequence
  Synthetic peptide
CKNFFWKTFTSCK

SEQ ID NO: 890 - protein, 16 aa, Artificial sequence
  Synthetic peptide
DRMPCKNFFWKTFTSC

SEQ ID NO: 891 - protein, 14 aa, Artificial sequence
  Synthetic peptide
MPCKNFFWKTFTSC

SEQ ID NO: 892 - protein, 12 aa, Artificial sequence
  Synthetic peptide
CKNFFWKTFTSC

SEQ ID NO: 893 - protein, 17 aa, Artificial sequence
  Synthetic peptide
AEPMPHSLNFSQYLWYT

SEQ ID NO: 894 - protein, 17 aa, Artificial sequence
  Synthetic peptide
AEHTYSSLWDTYSPLAF

SEQ ID NO: 895 - protein, 17 aa, Artificial sequence
  Synthetic peptide
AELDLWMRHYPLSFSNR

SEQ ID NO: 896 - protein, 17 aa, Artificial sequence
  Synthetic peptide
AESSLWTRYAWPSMPSY

SEQ ID NO: 897 - protein, 17 aa, Artificial sequence
  Synthetic peptide
AEWHPGLSFGSYLWSKT

SEQ ID NO: 898 - protein, 17 aa, Artificial sequence
  Synthetic peptide
AEPALLNWSFFFNPGLH

SEQ ID NO: 899 - protein, 17 aa, Artificial sequence
  Synthetic peptide
AEWSFYNLHLPEPQTIF

SEQ ID NO: 900 - protein, 17 aa, Artificial sequence
  Synthetic peptide
AEPLDLWSLYSLPPLAM

SEQ ID NO: 901 - protein, 17 aa, Artificial sequence
  Synthetic peptide
AEPTLWQLYQFPLRLSG

SEQ ID NO: 902 - protein, 17 aa, Artificial sequence
  Synthetic peptide
AEISFSELMWLRSTPAF

SEQ ID NO: 903 - protein, 17 aa, Artificial sequence
  Synthetic peptide
AELSEADLWTTWFGMGS

SEQ ID NO: 904 - protein, 17 aa, Artificial sequence
  Synthetic peptide
AESSLWRIFSPSALMMS

SEQ ID NO: 905 - protein, 17 aa, Artificial sequence
  Synthetic peptide
AESLPTLTSILWGKESV

SEQ ID NO: 906 - protein, 17 aa, Artificial sequence
  Synthetic peptide
AETLFMDLWHDKHILLT

SEQ ID NO: 907 - protein, 17 aa, Artificial sequence
  Synthetic peptide
AEILNFPLWHEPLWSTE

SEQ ID NO: 908 - protein, 17 aa, Artificial sequence
  Synthetic peptide
AESQTGTLNTLFWNTLR

SEQ ID NO: 909 - protein, 17 aa, Artificial sequence
  Synthetic peptide
AEPVYQYELDSYLRSYY

SEQ ID NO: 910 - protein, 17 aa, Artificial sequence
  Synthetic peptide
AELDLSTFYDIQYLLRT

SEQ ID NO: 911 - protein, 17 aa, Artificial sequence
  Synthetic peptide
AEFFKLGPNGYVYLHSA

SEQ ID NO: 912 - protein, 11 aa, Artificial sequence
  Synthetic peptide
  Misc feature (4)..(6): Xaa=any amino acid
FKLXXXGYVYL

SEQ ID NO: 913 - protein, 17 aa, Artificial sequence
  Synthetic peptide
AESTYHHLSLGYMYTLN

SEQ ID NO: 914 - protein, 11 aa, Artificial sequence
  Synthetic peptide
  Misc feature (3)..(3): Xaa=any amino acid
  Misc feature (5)..(6): Xaa=any amino acid
YHXLXXGYMYT

SEQ ID NO: 915 - protein, 19 aa, Artificial sequence
  Synthetic peptide
VEPNCDIHVMWEWECFERL

SEQ ID NO: 916 - protein, 18 aa, Artificial sequence
  Synthetic peptide
GERWCFDGPLTWVCGEES

SEQ ID NO: 917 - protein, 20 aa, Artificial sequence
  Synthetic peptide
RGWVEICVADDNGMCVTEAQ

SEQ ID NO: 918 - protein, 19 aa, Artificial sequence
  Synthetic peptide
GWDECDVARMWEWECFAGV

SEQ ID NO: 919 - protein, 18 aa, Artificial sequence
  Synthetic peptide
GERWCFDGPRAWVCGWEI

SEQ ID NO: 920 - protein, 18 aa, Artificial sequence
  Synthetic peptide
EELWCFDGPRAWVCGYVK

SEQ ID NO: 921 - protein, 20 aa, Artificial sequence
  Synthetic peptide
RGWVEICAADDYGRCLTEAQ

SEQ ID NO: 922 - protein, 16 aa, Artificial sequence
  Synthetic peptide
RGWVEICESDVWGRCL

SEQ ID NO: 923 - protein, 16 aa, Artificial sequence
  Synthetic peptide
RGWVEICESDVWGRCL

SEQ ID NO: 924 - protein, 19 aa, Artificial sequence
  Synthetic peptide
GGNECDIARMWEWECFERL

SEQ ID NO: 925 - protein, 16 aa, Artificial sequence
  Synthetic peptide
RGWVEICAADDYGRCL

SEQ ID NO: 926 - protein, 10 aa, Artificial sequence
  Synthetic peptide
CTTHWGFTLC

SEQ ID NO: 927 - protein, 8 aa, Artificial sequence
  Synthetic peptide
  Misc feature (6)..(6): Xaa=any amino acid
CLRSGXGC

SEQ ID NO: 928 - protein, 10 aa, Artificial sequence
  Synthetic peptide
  Misc feature (2)..(3): Xaa=any amino acid
  Misc feature (8)..(9): Xaa=any amino acid
CXXHWGFXXC

SEQ ID NO: 929 - protein, 5 aa, Artificial sequence
  Synthetic peptide
  Misc feature (2)..(2): Xaa= any amino acid
  Misc feature (4)..(4): Xaa= any amino acid
CXPXC

SEQ ID NO: 930 - protein, 10 aa, Artificial sequence
  Synthetic peptide
CRRHWGFEFC

SEQ ID NO: 931 - protein, 10 aa, Artificial sequence
  Synthetic peptide
STTHWGFTLS

SEQ ID NO: 932 - protein, 10 aa, Artificial sequence
  Synthetic peptide
CSLHWGFWWC

SEQ ID NO: 933 - protein, 15 aa, Artificial sequence
  Synthetic peptide
GFVCSGIFAVGVGRC

SEQ ID NO: 934 - protein, 15 aa, Artificial sequence
  Synthetic peptide
APGVRLGCAVLGRYC

SEQ ID NO: 935 - protein, 6 aa, Artificial sequence
  Synthetic peptide
LLGRMK

SEQ ID NO: 936 - protein, 27 aa, Artificial sequence
  Synthetic peptide
ICVVQDWGHHRCTAGHMANLTSHASAI

SEQ ID NO: 937 - protein, 13 aa, Artificial sequence
  Synthetic peptide
ICVVQDWGHHRCT

SEQ ID NO: 938 - protein, 11 aa, Artificial sequence
  Synthetic peptide
CVVQDWGHHAC

SEQ ID NO: 939 - protein, 27 aa, Artificial sequence
  Synthetic peptide
STGGFDDVYDWARGVSSALTTTLVATR

SEQ ID NO: 940 - protein, 27 aa, Artificial sequence
  Synthetic peptide
STGGFDDVYDWARRVSSALTTTLVATR

SEQ ID NO: 941 - protein, 30 aa, Artificial sequence
  Synthetic peptide
SRGVNFSEWLYDMSAAMKEASNVFPSRRSR

SEQ ID NO: 942 - protein, 30 aa, Artificial sequence
  Synthetic peptide
SSQNWDMEAGVEDLTAAMLGLLSTIHSSSR

SEQ ID NO: 943 - protein, 31 aa, Artificial sequence
  Synthetic peptide
SSPSLYTQFLVNYESAATRIQDLLIASRPSR

SEQ ID NO: 944 - protein, 31 aa, Artificial sequence
  Synthetic peptide
SSTGWVDLLGALQRAADATRTSIPPSLQNSR

SEQ ID NO: 945 - protein, 18 aa, Artificial sequence
  Synthetic peptide
DVYTKKELIECARRVSEK

SEQ ID NO: 946 - protein, 22 aa, Artificial sequence
  Synthetic peptide
EKGSYYPGSGIAQFHIDYNNVS

SEQ ID NO: 947 - protein, 22 aa, Artificial sequence
  Synthetic peptide
SGIAQFHIDYNNVSSAEGWHVN

SEQ ID NO: 948 - protein, 34 aa, Artificial sequence
  Synthetic peptide
LVTVEKGSYYPGSGIAQFHIDYNNVSSAEGWHVN

SEQ ID NO: 949 - protein, 14 aa, Artificial sequence
  Synthetic peptide
SGIAQFHIDYNNVS

SEQ ID NO: 950 - protein, 6 aa, Artificial sequence
  Synthetic peptide
LLGRMK

SEQ ID NO: 951 - protein, 8 aa, Artificial sequence
  Synthetic peptide
ALLGRMKG

SEQ ID NO: 952 - protein, 6 aa, Artificial sequence
  Synthetic peptide
LDPAFR

SEQ ID NO: 953 - protein, 7 aa, Artificial sequence
  Synthetic peptide
  Misc feature (2)..(3): Xaa=any amino acid
CXXRGDC

SEQ ID NO: 954 - protein, 7 aa, Artificial sequence
  Synthetic peptide
RPLPPLP

SEQ ID NO: 955 - protein, 6 aa, Artificial sequence
  Synthetic peptide
PPVPPR

SEQ ID NO: 956 - protein, 11 aa, Artificial sequence
  Synthetic peptide
  Misc feature (1)..(1): Xaa= any amino acid
  Misc feature (3)..(3): Xaa= any amino acid
  Misc feature (5)..(5): Xaa= any amino acid
  Misc feature (7)..(8): Xaa= any amino acid
  Misc feature (10)..(11): Xaa= any amino acid
XFXDXWXXLXX

SEQ ID NO: 957 - protein, 20 aa, Artificial sequence
  Synthetic peptide
KACRRLFGPVDSEQLSRDCD

SEQ ID NO: 958 - protein, 20 aa, Artificial sequence
  Synthetic peptide
RERWNFDFVTETPLEGDFAW

SEQ ID NO: 959 - protein, 20 aa, Artificial sequence
  Synthetic peptide
KRRQTSMTDFYHSKRRLIFS

SEQ ID NO: 960 - protein, 20 aa, Artificial sequence
  Synthetic peptide
TSMTDFYHSKRRLIFSKRKP

SEQ ID NO: 961 - protein, 5 aa, Artificial sequence
  Synthetic peptide
RRLIF

SEQ ID NO: 962 - protein, 36 aa, Artificial sequence [sequence omitted]

SEQ ID NO: 963 - protein, 24 aa, Artificial sequence
  Synthetic peptide
KRRLIFSKRQIKIWFQNRRMKWKK

SEQ ID NO: 964 - protein, 24 aa, Artificial sequence
  Synthetic peptide
NQGRHFCGALIHARFVMTAASCFQ

SEQ ID NO: 965 - protein, 20 aa, Artificial sequence
  Synthetic peptide
RHFCGGALIHARFVMTAASC

SEQ ID NO: 966 - protein, 27 aa, Artificial sequence
  Synthetic peptide
GTRCQVAGWGSQRSGGRLSRFPRFVNV

SEQ ID NO: 967 - protein, 15 aa, Artificial sequence
  Synthetic peptide
WHWRHRIPLQLAAGR

SEQ ID NO: 968 - protein, 6 aa, Artificial sequence
  Synthetic peptide
LKTPRV

SEQ ID NO: 969 - protein, 8 aa, Artificial sequence
  Synthetic peptid
NTLKTPRV

SEQ ID NO: 970 - protein, 11 aa, Artificial sequence
  Synthetic peptide
NTLKTPRVGGC

SEQ ID NO: 971 - protein, 6 aa, Artificial sequence
  Synthetic peptide
KDKATF

SEQ ID NO: 972 - protein, 10 aa, Artificial sequence
  Synthetic peptide
KDKATFGCHD

SEQ ID NO: 973 - protein, 12 aa, Artificial sequence
  Synthetic peptide
KDKATFGCHDGC

SEQ ID NO: 974 - protein, 6 aa, Artificial sequence
  Synthetic peptide
TLRVYK

SEQ ID NO: 975 - protein, 9 aa, Artificial sequence
  Synthetic peptide
ATLRVYKGG

SEQ ID NO: 976 - protein, 10 aa, Artificial sequence
  Synthetic peptide
CATLRVYKGG

SEQ ID NO: 977 - protein, 14 aa, Artificial sequence
  Synthetic peptide
INLKALAALAKKIL

SEQ ID NO: 978 - protein, 12 aa, Artificial sequence
  Synthetic peptide
GWTLNSAGYLLG

SEQ ID NO: 979 - protein, 27 aa, Artificial sequence
  Synthetic peptide
GWTLNSAGYLLGKINLKALAALAKKIL

SEQ ID NO: 980 - protein, 7 aa, Artificial sequence
  Synthetic peptide
CVHAYRS

SEQ ID NO: 981 - protein, 7 aa, Artificial sequence
  Synthetic peptide
CVHAYRA

SEQ ID NO: 982 - protein, 7 aa, Artificial sequence
  Synthetic peptide
CVHAPRS

SEQ ID NO: 983 - protein, 7 aa, Artificial sequence
  Synthetic peptide
CVHAPRA

SEQ ID NO: 984 - protein, 7 aa, Artificial sequence
  Synthetic peptide
CVHSYRS

SEQ ID NO: 985 - protein, 7 aa, Artificial sequence
  Synthetic peptide
CVHSYRA

SEQ ID NO: 986 - protein, 7 aa, Artificial sequence
  Synthetic peptide
CVHSPRS

SEQ ID NO: 987 - protein, 7 aa, Artificial sequence
  Synthetic peptide
CVHSPRA

SEQ ID NO: 988 - protein, 7 aa, Artificial sequence
  Synthetic peptide
CVHTYRS

SEQ ID NO: 989 - protein, 7 aa, Artificial sequence
  Synthetic peptide
CVHTYRA

SEQ ID NO: 990 - protein, 7 aa, Artificial sequence
  Synthetic peptide
CVHTPRS

SEQ ID NO: 991 - protein, 7 aa, Artificial sequence
  Synthetic peptide
CVHTPRA

SEQ ID NO: 992 - protein, 6 aa, Artificial sequence
  Synthetic peptide
HWAWFK

SEQ ID NO: 993 - protein, 32 aa, Artificial sequence
  Synthetic peptide
IEGPTLRQWLAARAGPNGIEGPTLRQWLAARA

SEQ ID NO: 994 - protein, 36 aa, Artificial sequence
  Synthetic peptide
IEGPTLRQCLAARAGGGGGGGGIEGPTLRQCLAARA

SEQ ID NO: 995 - protein, 36 aa, Artificial sequence; identical to SEQ ID NO: 994
  Synthetic peptide

SEQ ID NO: 996 - protein, 36 aa, Artificial sequence
  Synthetic peptide
IEGPTLRQALAARAGGGGGGGGIEGPTLRQALAARA

SEQ ID NO: 997 - protein, 36 aa, Artificial sequence
  Synthetic peptide
IEGPTLRQWLAARAGGGKGGGGIEGPTLRQWLAARA

SEQ ID NO: 998 - protein, 36 aa, Artificial sequence; identical to SEQ ID NO: 997
  Synthetic peptide

SEQ ID NO: 999 - protein, 36 aa, Artificial sequence
  Synthetic peptide
IEGPTLRQWLAARAGGGCGGGGIEGPTLRQWLAARA

SEQ ID NO: 1000 - protein, 36 aa, Artificial sequence; identical to SEQ ID NO: 997
  Synthetic peptide

SEQ ID NO: 1001 - protein, 36 aa, Artificial sequence; identical to SEQ ID NO: 999
  Synthetic peptide

SEQ ID NO: 1002 - protein, 36 aa, Artificial sequence
  Synthetic peptide
IEGPTLRQWLAARAGGGNGSGGIEGPTLRQWLAARA

SEQ ID NO: 1003 - protein, 36 aa, Artificial sequence; identical to SEQ ID NO: 999
  Synthetic peptide

SEQ ID NO: 1004 - protein, 36 aa, Artificial sequence
  Synthetic peptide
IEGPTLRQWLAARAGGGGGGGGIEGPTLRQWLAARA

SEQ ID NO: 1005 - protein, 32 aa, Artificial sequence; identical to SEQ ID NO: 993
  Synthetic peptide

SEQ ID NO: 1006 - protein, 32 aa, Artificial sequence; identical to SEQ ID NO: 993
  Synthetic peptide

SEQ ID NO: 1007 - protein, 36 aa, Artificial sequence; identical to SEQ ID NO: 1004
  Synthetic peptide

SEQ ID NO: 1008 - protein, 34 aa, Artificial sequence
  Synthetic peptide
GGIEGPTLRQWLAARAGPNGIEGPTLRQWLAARA

SEQ ID NO: 1009 - protein, 36 aa, Artificial sequence; identical to SEQ ID NO: 1004
  Synthetic peptide

SEQ ID NO: 1010 - protein, 36 aa, Artificial sequence; identical to SEQ ID NO: 994
  Synthetic peptide

SEQ ID NO: 1011 - protein, 36 aa, Artificial sequence; identical to SEQ ID NO: 994
  Synthetic peptide

SEQ ID NO: 1012 - protein, 36 aa, Artificial sequence; identical to SEQ ID NO: 996
  Synthetic peptide

SEQ ID NO: 1013 - protein, 36 aa, Artificial sequence; identical to SEQ ID NO: 997
  Synthetic peptide

SEQ ID NO: 1014 - protein, 36 aa, Artificial sequence; identical to SEQ ID NO: 999
  Synthetic peptide

SEQ ID NO: 1015 - protein, 36 aa, Artificial sequence; identical to SEQ ID NO: 1002
  Synthetic peptide

SEQ ID NO: 1016 - protein, 36 aa, Artificial sequence; identical to SEQ ID NO: 999
  Synthetic peptide

SEQ ID NO: 1017 - protein, 41 aa, Artificial sequence
  Synthetic peptide
GGGGGIEGPTLRQWLAARAGGGGGGGGIEGPTLRQWLAARA

SEQ ID NO: 1018 - protein, 8 aa, Artificial sequence
  Synthetic peptide
GGGKGGGG

SEQ ID NO: 1019 - protein, 8 aa, Artificial sequence
  Synthetic peptide
GGGNGSGG

SEQ ID NO: 1020 - protein, 8 aa, Artificial sequence
  Synthetic peptide
GGGCGGGG

SEQ ID NO: 1021 - protein, 5 aa, Artificial sequence
  Synthetic peptide
GPNGG

SEQ ID NO: 1022 - DNA, 29 bp, Artificial Sequence
  Synthetic primer
ccgggtaaaggtggaggtggtggtatcga

SEQ ID NO: 1023 - DNA, 18 bp, Artificial sequence
  Synthetic primer
ctagttattgctcagcgg

SEQ ID NO: 1024 - DNA, 29 bp, Artificial Sequence
  Synthetic primer
ccgggtaaaggtggaggtggtggtatcga

SEQ ID NO: 1025 - DNA, 30 bp, Artificial sequence
  Synthetic primer
ccacctccacctttacccggagagtgggag

SEQ ID NO: 1026 - DNA, 25 bp, Artificial sequence
  Synthetic primer
cgtacaggtttacgcaagaaaatgg

SEQ ID NO: 1027 - DNA, 30 bp, Artificial sequence; identical to SEQ ID NO: 1025
  Synthetic primer

SEQ ID NO: 1028 - DNA, 25 bp, Artificial sequence
  Synthetic primer
cgtacaggtttacgcaagaaaatgg

SEQ ID NO: 1029 - DNA, 18 bp, Artificial sequence
  Synthetic primer
ctagttattgctcagcgg

SEQ ID NO: 1030 - DNA, 25 bp, Artificial sequence
  Synthetic peptide
cgtacaggtttacgcaagaaaatgg

SEQ ID NO: 1031 - DNA, 18 bp, Artificial sequence
  Synthetic primer
ctagttattgctcagcgg

SEQ ID NO: 1032 - DNA, 895 bp, Artificial sequence
  Synthetic polynucleotide
gatttgattctagatttgttttaactaattaaaggaggaataacatatggtcgacggttgtaagccatgcatttgtacagtcccagaagtatcatctgtcttcatcttccccccaaagcccaaggatgtgctcaccattactctgactcctaaggtcacgtgtgttgtggtagacatcagcaaggatgatcccgaggtccagttcagctggtttgtagatgatgtggaggtgcacacagctcagacgcaaccccgggaggagcagttcaacagcactttccgctcagtcagtgaacttcccatcatgcaccaggactggctcaatggcaaggagttcaaatgcagggtcaacagtgcagctttccctgcccccatcgagaaaaccatctccaaaaccaaaggcagaccgaaggctccacaggtgtacaccattccacctcccaaggagcagatggccaaggataaagtcagtctgacctgcatgataacagacttcttccctgaagacattactgtggagtggcagtggaatgggcagccagcggagaactacaagaacactcagcccatcatggacacagatggctcttacttcgtctacagcaagctcaatgtgcagaagagcaactgggaggcaggaaatactttcacctgctctgtgttacatgagggcctgcacaaccaccatactgagaagagcctctcccactctccgggtaaaggtggaggtggtggtatcgaaggtccgactctgcgtcagtggctggctgctcgtgctggtggtggaggtggcggcggaggtattgagggcccaacccttcgccaatggcttgcagcacgcgcataatctcgaggatccgcggaaagaagaagaagaagaagaaagcccgaaagg

SEQ ID NO: 1033 - protein, 266 aa, Artificial sequence
  Synthetic peptide
MVDGCKPCICTVPEVSSVFIFPPKPKDVLTITLTPKVTCVVVDISKDDPEVQFSWFVDDVEVHTAQTQPREEQFNSTFRSVSELPIMHQDWLNGKEFKCRVNSAAFPAPIEKTISKTKGRPKAPQVYTIPPPKEQMAKDKVSLTCMITDFFPEDITVEWQWNGQPAENYKNTQPIMDTDGSYFVYSKLNVQKSNWEAGNTFTCSVLHEGLHNHHTEKSLSHSPGKGGGGGIEGPTLRQWLAARAGGGGGGGGIEGPTLRQWLAARA

SEQ ID NO: 1034 - DNA, 895 bp, Artificial sequence; identical to SEQ ID NO: 1032
  Synthetic polynucleotide

SEQ ID NO: 1035 - protein, 266 aa, Artificial sequence; identical to SEQ ID NO: 1033
  Synthetic peptide

SEQ ID NO: 1036 - protein, 14 aa, Artificial sequence
  Synthetic peptide
KDKCKMWHWMCKPP

SEQ ID NO: 1037 - protein, 14 aa, Artificial sequence
  Synthetic peptide
KDLCAMWHWMCKPP

SEQ ID NO: 1038 - protein, 14 aa, Artificial sequence
  Synthetic peptide
KDLCKMWKWMCKPP

SEQ ID NO: 1039 - protein, 14 aa, Artificial sequence
  Synthetic peptide
KDLCKMWHWMCKPK

SEQ ID NO: 1040 - protein, 14 aa, Artificial sequence
  Synthetic peptide
WYPCYEFHFWCYDL

SEQ ID NO: 1041 - protein, 14 aa, Artificial sequence
  Synthetic peptide
WYPCYEGHFWCYDL

SEQ ID NO: 1042 - protein, 14 aa, Artificial sequence
  Synthetic peptide
IFGCKWWDVQCYQF

SEQ ID NO: 1043 - protein, 14 aa, Artificial sequence
  Synthetic peptide
IFGCKWWDVDCYQF

SEQ ID NO: 1044 - protein, 14 aa, Artificial sequence
  Synthetic peptide
ADWCVSPNWFCMVM

SEQ ID NO: 1045 - protein, 14 aa, Artificial sequence
  Synthetic peptide
HKFCPWWALFCWDF

SEQ ID NO: 1046 - protein, 14 aa, Artificial sequence
  Synthetic peptide
KDLCKMWHWMCKPP

SEQ ID NO: 1047 - protein, 14 aa, Artificial sequence
  Synthetic peptide
IDKCAIWGWMCPPL

SEQ ID NO: 1048 - protein, 14 aa, Artificial sequence
  Synthetic peptide
WYPCGEFGMWCLNV

SEQ ID NO: 1049 - protein, 11 aa, Artificial sequence
  Synthetic peptide
WFTCLWNCDNE

SEQ ID NO: 1050 - protein, 14 aa, Artificial sequence
  Synthetic peptide
HTPCPWFAPLCVEW

SEQ ID NO: 1051 - protein, 14 aa, Artificial sequence
  Synthetic peptide
KEWCWRWKWMCKPE

SEQ ID NO: 1052 - protein, 14 aa, Artificial sequence
  Synthetic peptide
FETCPSWAYFCLDI

SEQ ID NO: 1053 - protein, 14 aa, Artificial sequence
  Synthetic peptide
AYKCEANDWGCWWL

SEQ ID NO: 1054 - protein, 14 aa, Artificial sequence
  Synthetic peptide
NSWCEDQWHRCWWL

SEQ ID NO: 1055 - protein, 14 aa, Artificial sequence
  Synthetic peptide
WSACYAGHFWCYDL

SEQ ID NO: 1056 - protein, 14 aa, Artificial sequence
  Synthetic peptide
ANWCVSPNWFCMVM

SEQ ID NO: 1057 - protein, 14 aa, Artificial sequence
  Synthetic peptide
WTECYQQEFWCWNL

SEQ ID NO: 1058 - protein, 14 aa, Artificial sequence
  Synthetic peptide
ENTCERWKWMCPPK

SEQ ID NO: 1059 - protein, 14 aa, Artificial sequence
  Synthetic peptide
WLPCHQEGFWCMNF

SEQ ID NO: 1060 - protein, 14 aa, Artificial sequence
  Synthetic peptide
STMCSQWHWMCNPF

SEQ ID NO: 1061 - protein, 14 aa, Artificial sequence
  Synthetic peptide
IFGCHWWDVDCYQF

SEQ ID NO: 1062 - protein, 14 aa, Artificial sequence
  Synthetic peptide
IYGCKWWDIQCYDI

SEQ ID NO: 1063 - protein, 14 aa, Artificial sequence
  Synthetic peptide
PDWCIDPDWWCKFW

SEQ ID NO: 1064 - protein, 14 aa, Artificial sequence
  Synthetic peptide
QGHCTRWPWMCPPY

SEQ ID NO: 1065 - protein, 14 aa, Artificial sequence
  Synthetic peptide
WQECYREGFWCLQT

SEQ ID NO: 1066 - protein, 14 aa, Artificial sequence
  Synthetic peptide
WFDCYGPGFKCWSP

SEQ ID NO: 1067 - protein, 14 aa, Artificial sequence
  Synthetic peptide
GVRCPKGHLWCLYP

SEQ ID NO: 1068 - protein, 14 aa, Artificial sequence
  Synthetic peptide
HWACGYWPWSCKWV

SEQ ID NO: 1069 - protein, 14 aa, Artificial sequence
  Synthetic peptide
GPACHSPWWWCVFG

SEQ ID NO: 1070 - protein, 14 aa, Artificial sequence
  Synthetic peptide
TTWCISPMWFCSQQ

SEQ ID NO: 1071 - protein, 14 aa, Artificial sequence
  Synthetic peptide
HKFCPPWAIFCWDF

SEQ ID NO: 1072 - protein, 14 aa, Artificial sequence
  Synthetic peptide
PDWCVSPRWYCNMW

SEQ ID NO: 1073 - protein, 14 aa, Artificial sequence
  Synthetic peptide
VWKCHWFGMDCEPT

SEQ ID NO: 1074 - protein, 14 aa, Artificial sequence
  Synthetic peptide
KKHCQIWTWMCAPK

SEQ ID NO: 1075 - protein, 14 aa, Artificial sequence
  Synthetic peptide
WFQCGSTLFWCYNL

SEQ ID NO: 1076 - protein, 14 aa, Artificial sequence
  Synthetic peptide
WSPCYDHYFYCYTI

SEQ ID NO: 1077 - protein, 14 aa, Artificial sequence
  Synthetic peptide
SWMCGFFKEVCMWV

SEQ ID NO: 1078 - protein, 14 aa, Artificial sequence
  Synthetic peptide
EMLCMIHPVFCNPH

SEQ ID NO: 1079 - protein, 14 aa, Artificial sequence
  Synthetic peptide
LKTCNLWPWMCPPL

SEQ ID NO: 1080 - protein, 14 aa, Artificial sequence
  Synthetic peptide
VVGCKWYEAWCYNK

SEQ ID NO: 1081 - protein, 14 aa, Artificial sequence
  Synthetic peptide
PIHCTQWAWMCPPT

SEQ ID NO: 1082 - protein, 14 aa, Artificial sequence
  Synthetic peptide
DSNCPWYFLSCVIF

SEQ ID NO: 1083 - protein, 14 aa, Artificial sequence
  Synthetic peptide
HIWCNLAMMKCVEM

SEQ ID NO: 1084 - protein, 14 aa, Artificial sequence
  Synthetic peptide
NLQCIYFLGKCIYF

SEQ ID NO: 1085 - protein, 14 aa, Artificial sequence
  Synthetic peptide
AWRCMWFSDVCTPG

SEQ ID NO: 1086 - protein, 14 aa, Artificial sequence
  Synthetic peptide
WFRCFLDADWCTSV

SEQ ID NO: 1087 - protein, 14 aa, Artificial sequence
  Synthetic peptide
EKICQMWSWMCAPP

SEQ ID NO: 1088 - protein, 14 aa, Artificial sequence
  Synthetic peptide
WFYCHLNKSECTEP

SEQ ID NO: 1089 - protein, 14 aa, Artificial sequence
  Synthetic peptide
FWRCAIGIDKCKRV

SEQ ID NO: 1090 - protein, 14 aa, Artificial sequence
  Synthetic peptide
NLGCKWYEVWCFTY

SEQ ID NO: 1091 - protein, 14 aa, Artificial sequence
  Synthetic peptide
IDLCNMWDGMCYPP

SEQ ID NO: 1092 - protein, 14 aa, Artificial sequence
  Synthetic peptide
EMPCNIWGWMCPPV

SEQ ID NO: 1093 - protein, 18 aa, Artificial sequence
  Synthetic peptide
WFRCVLTGIVDWSECFGL

SEQ ID NO: 1094 - protein, 18 aa, Artificial sequence
  Synthetic peptide
GFSCTFGLDEFYVDCSPF

SEQ ID NO: 1095 - protein, 18 aa, Artificial sequence
  Synthetic peptide
LPWCHDQVNADWGFCMLW

SEQ ID NO: 1096 - protein, 18 aa, Artificial sequence
  Synthetic peptide
YPTCSEKFWIYGQTCVLW

SEQ ID NO: 1097 - protein, 18 aa, Artificial sequence
  Synthetic peptide
LGPCPIHHGPWPQYCVYW

SEQ ID NO: 1098 - protein, 18 aa, Artificial sequence
  Synthetic peptide
PFPCETHQISWLGHCLSF

SEQ ID NO: 1099 - protein, 18 aa, Artificial sequence
  Synthetic peptide
HWGCEDLMWSWHPLCRRP

SEQ ID NO: 1100 - protein, 18 aa, Artificial sequence
  Synthetic peptide
LPLCDADMMPTIGFCVAY

SEQ ID NO: 1101 - protein, 18 aa, Artificial sequence
  Synthetic peptide
SHWCETTFWMNYAKCVHA

SEQ ID NO: 1102 - protein, 18 aa, Artificial sequence
  Synthetic peptide
LPKCTHVPFDQGGFCLWY

SEQ ID NO: 1103 - protein, 18 aa, Artificial sequence
  Synthetic peptide
FSSCWSPVSRQDMFCVFY

SEQ ID NO: 1104 - protein, 17 aa, Artificial sequence
  Synthetic peptide
SHKCEYSGWLQPLCYRP

SEQ ID NO: 1105 - protein, 18 aa, Artificial sequence
  Synthetic peptide
PWWCQDNYVQHMLHCDSP

SEQ ID NO: 1106 - protein, 18 aa, Artificial sequence
  Synthetic peptide
WFRCMLMNSFDAFQCVSY

SEQ ID NO: 1107 - protein, 18 aa, Artificial sequence
  Synthetic peptide
PDACRDQPWYMFMGCMLG

SEQ ID NO: 1108 - protein, 14 aa, Artificial sequence
  Synthetic peptide
FLACFVEFELCFDS

SEQ ID NO: 1109 - protein, 18 aa, Artificial sequence
  Synthetic peptide
SAYCIITESDPYVLCVPL

SEQ ID NO: 1110 - protein, 18 aa, Artificial sequence
  Synthetic peptide
PSICESYSTMWLPMCQHN

SEQ ID NO: 1111 - protein, 18 aa, Artificial sequence
  Synthetic peptide
WLDCHDDSWAWTKMCRSH

SEQ ID NO: 1112 - protein, 18 aa, Artificial sequence
  Synthetic peptide
YLNCVMMNTSPFVECVFN

SEQ ID NO: 1113 - protein, 18 aa, Artificial sequence
  Synthetic peptide
YPWCDGFMIQQGITCMFY

SEQ ID NO: 1114 - protein, 18 aa, Artificial sequence
  Synthetic peptide
FDYCTWLNGFKDWKCWSR

SEQ ID NO: 1115 - protein, 18 aa, Artificial sequence
  Synthetic peptide
LPLCNLKEISHVQACVLF

SEQ ID NO: 1116 - protein, 18 aa, Artificial sequence
  Synthetic peptide
SPECAFARWLGIEQCQRD

SEQ ID NO: 1117 - protein, 18 aa, Artificial sequence
  Synthetic peptide
YPQCFNLHLLEWTECDWF

SEQ ID NO: 1118 - protein, 18 aa, Artificial sequence
  Synthetic peptide
RWRCEIYDSEFLPKCWFF

SEQ ID NO: 1119 - protein, 14 aa, Artificial sequence
  Synthetic peptide
LVGCDNVWHRCKLF

SEQ ID NO: 1120 - protein, 18 aa, Artificial sequence
  Synthetic peptide
AGWCHVWGEMFGMGCSAL

SEQ ID NO: 1121 - protein, 18 aa, Artificial sequence
  Synthetic peptide
HHECEWMARWMSLDCVGL

SEQ ID NO: 1122 - protein, 18 aa, Artificial sequence
  Synthetic peptide
FPMCGIAGMKDFDFCVWY

SEQ ID NO: 1123 - protein, 18 aa, Artificial sequence
  Synthetic peptide
RDDCTFWPEWLWKLCERP

SEQ ID NO: 1124 - protein, 18 aa, Artificial sequence
  Synthetic peptide
YNFCSYLFGVSKEACQLP

SEQ ID NO: 1125 - protein, 18 aa, Artificial sequence
  Synthetic peptide
AHWCEQGPWRYGNICMAY

SEQ ID NO: 1126 - protein, 18 aa, Artificial sequence
  Synthetic peptide
NLVCGKISAWGDEACARA

SEQ ID NO: 1127 - protein, 18 aa, Artificial sequence
  Synthetic peptide
HNVCTIMGPSMKWFCWND

SEQ ID NO: 1128 - protein, 18 aa, Artificial sequence
  Synthetic peptide
NDLCAMWGWRNTIWCQNS

SEQ ID NO: 1129 - protein, 18 aa, Artificial sequence
  Synthetic peptide
PPFCQNDNDMLQSLCKLL

SEQ ID NO: 1130 - protein, 18 aa, Artificial sequence
  Synthetic peptide
WYDCNVPNELLSGLCRLF

SEQ ID NO: 1131 - protein, 18 aa, Artificial sequence
  Synthetic peptide
YGDCDQNHWMWPFTCLSL

SEQ ID NO: 1132 - protein, 18 aa, Artificial sequence
  Synthetic peptide
GWMCHFDLHDWGATCQPD

SEQ ID NO: 1133 - protein, 18 aa, Artificial sequence
  Synthetic peptide
YFHCMFGGHEFEVHCESF

SEQ ID NO: 1134 - protein, 12 aa, Artificial sequence
  Synthetic peptide
AYWCWHGQCVRF

SEQ ID NO: 1135 - protein, 19 aa, Artificial sequence
  Synthetic peptide
SEHWTFTDWDGNEWWVRPF

SEQ ID NO: 1136 - protein, 20 aa, Artificial sequence
  Synthetic peptide
MEMLDSLFELLKDMVPISKA

SEQ ID NO: 1137 - protein, 19 aa, Artificial sequence
  Synthetic peptide
SPPEEALMEWLGWQYGKFT

SEQ ID NO: 1138 - protein, 20 aa, Artificial sequence
  Synthetic peptide
SPENLLNDLYILMTKQEWYG

SEQ ID NO: 1139 - protein, 20 aa, Artificial sequence
  Synthetic peptide
FHWEEGIPFHVVTPYSYDRM

SEQ ID NO: 1140 - protein, 19 aa, Artificial sequence
  Synthetic peptide
KRLLEQFMNDLAELVSGHS

SEQ ID NO: 1141 - protein, 20 aa, Artificial sequence
  Synthetic peptide
DTRDALFQEFYEFVRSRLVI

SEQ ID NO: 1142 - protein, 20 aa, Artificial sequence
  Synthetic peptide
RMSAAPRPLTYRDIMDQYWH

SEQ ID NO: 1143 - protein, 20 aa, Artificial sequence
  Synthetic peptide
NDKAHFFEMFMFDVHNFVES

SEQ ID NO: 1144 - protein, 20 aa, Artificial sequence
  Synthetic peptide
QTQAQKIDGLWELLQSIRNQ

SEQ ID NO: 1145 - protein, 18 aa, Artificial sequence
  Synthetic peptide
MLSEFEEFLGNLVHRQEA

SEQ ID NO: 1146 - protein, 20 aa, Artificial sequence
  Synthetic peptide
YTPKMGSEWTSFWHNRIHYL

SEQ ID NO: 1147 - protein, 20 aa, Artificial sequence
  Synthetic peptide
LNDTLLRELKMVLNSLSDMK

SEQ ID NO: 1148 - protein, 20 aa, Artificial sequence
  Synthetic peptide
FDVERDLMRWLEGFMQSAAT

SEQ ID NO: 1149 - protein, 20 aa, Artificial sequence
  Synthetic peptide
HHGWNYLRKGSAPQWFEAWV

SEQ ID NO: 1150 - protein, 20 aa, Artificial sequence
  Synthetic peptide
VESLHQLQMWLDQKLASGPH

SEQ ID NO: 1151 - protein, 18 aa, Artificial sequence
  Synthetic peptide
RATLLKDFWQLVEGYGDN

SEQ ID NO: 1152 - protein, 16 aa, Artificial sequence
  Synthetic peptide
EELLREFYRFVSAFDY

SEQ ID NO: 1153 - protein, 20 aa, Artificial sequence
  Synthetic peptide
GLLDEFSHFIAEQFYQMPGG

SEQ ID NO: 1154 - protein, 20 aa, Artificial sequence
  Synthetic peptide
YREMSMLEGLLDVLERLQHY

SEQ ID NO: 1155 - protein, 20 aa, Artificial sequence
  Synthetic peptide
HNSSQMLLSELIMLVGSMMQ

SEQ ID NO: 1156 - protein, 20 aa, Artificial sequence
  Synthetic peptide
WREHFLNSDYIRDKLIAIDG

SEQ ID NO: 1157 - protein, 19 aa, Artificial sequence
  Synthetic peptide
QFPFYVFDDLPAQLEYWIA

SEQ ID NO: 1158 - protein, 20 aa, Artificial sequence
  Synthetic peptide
EFFHWLHNHRSEVNHWLDMN

SEQ ID NO: 1159 - protein, 19 aa, Artificial sequence
  Synthetic peptide
EALFQNFFRDVLTLSEREY

SEQ ID NO: 1160 - protein, 20 aa, Artificial sequence
  Synthetic peptide
QYWEQQWMTYFRENGLHVQY

SEQ ID NO: 1161 - protein, 20 aa, Artificial sequence
  Synthetic peptide
NQRMMLEDLWRIMTPMFGRS

SEQ ID NO: 1162 - protein, 20 aa, Artificial sequence
  Synthetic peptide
FLDELKAELSRHYALDDLDE

SEQ ID NO: 1163 - protein, 20 aa, Artificial sequence
  Synthetic peptide
GKLIEGLLNELMQLETFMPD

SEQ ID NO: 1164 - protein, 15 aa, Artificial sequence
  Synthetic peptide
ILLLDEYKKDWKSWF

SEQ ID NO: 1165 - protein, 50 aa, Artificial sequence
  Synthetic peptide
QGHCTRWPWMCPPYGSGSATGGSGSTASSGSGSATGQGHCTRWPWMCPPY

SEQ ID NO: 1166 - protein, 43 aa, Artificial sequence
  Synthetic peptide
WYPCYEGHFWCYDLGSGSTASSGSGSATGWYPCYEGHFWCYDL

SEQ ID NO: 1167 - protein, 50 aa, Artificial sequence
  Synthetic peptide
HTPCPWFAPLCVEWGSGSATGGSGSTASSGSGSATGHTPCPWFAPLCVEW

SEQ ID NO: 1168 - protein, 50 aa, Artificial sequence
  Synthetic peptide
PDWCIDPDWWCKFWGSGSATGGSGSTASSGSGSATGPDWCIDPDWWCKFW

SEQ ID NO: 1169 - protein, 50 aa, Artificial sequence
  Synthetic peptide
ANWCVSPNWFCMVMGSGSATGGSGSTASSGSGSATGANWCVSPNWFCMVM

SEQ ID NO: 1170 - protein, 50 aa, Artificial sequence; identical to SEQ ID NO: 1168
  Synthetic peptide

SEQ ID NO: 1171 - protein, 50 aa, Artificial sequence
  Synthetic peptide
HWACGYWPWSCKWVGSGSATGGSGSTASSGSGSATGHWACGYWPWSCKWV

SEQ ID NO: 1172 - protein, 50 aa, Artificial sequence
  Synthetic peptide
KKHCQIWTWMCAPKGSGSATGGSGSTASSGSGSATGQGHCTRWPWMCPPY

SEQ ID NO: 1173 - protein, 50 aa, Artificial sequence
  Synthetic peptide
QGHCTRWPWMCPPYGSGSATGGSGSTASSGSGSATGKKHCQIWTWMCAPK

SEQ ID NO: 1174 - protein, 50 aa, Artificial sequence; identical to SEQ ID NO: 1172
  Synthetic peptide

SEQ ID NO: 1175 - protein, 36 aa, Artificial sequence
  Synthetic peptide
KKHCQIWTWMCAPKGGGGGGGGQGHCTRWPWMCPPY

SEQ ID NO: 1176 - protein, 34 aa, Artificial sequence
  Synthetic peptide
QGHCTRWPWMCPPYGGGGGGKKHCQIWTWMCAPK

SEQ ID NO: 1177 - protein, 20 aa, Artificial sequence
  Synthetic peptide
VALHGQCTRWPWMCPPQREG

SEQ ID NO: 1178 - protein, 20 aa, Artificial sequence
  Synthetic peptide
YPEQGLCTRWPWMCPPQTLA

SEQ ID NO: 1179 - protein, 20 aa, Artificial sequence
  Synthetic peptide
GLNQGHCTRWPWMCPPQDSN

SEQ ID NO: 1180 - protein, 20 aa, Artificial sequence
  Synthetic peptide
MITQGQCTRWPWMCPPQPSG

SEQ ID NO: 1181 - protein, 20 aa, Artificial sequence
  Synthetic peptide
AGAQEHCTRWPWMCAPNDWI

SEQ ID NO: 1182 - protein, 20 aa, Artificial sequence
  Synthetic peptide
GVNQGQCTRWRWMCPPNGWE

SEQ ID NO: 1183 - protein, 20 aa, Artificial sequence
  Synthetic peptide
LADHGQCIRWPWMCPPEGWE

SEQ ID NO: 1184 - protein, 20 aa, Artificial sequence
  Synthetic peptide
ILEQAQCTRWPWMCPPQRGG

SEQ ID NO: 1185 - protein, 20 aa, Artificial sequence
  Synthetic peptide
TQTHAQCTRWPWMCPPQWEG

SEQ ID NO: 1186 - protein, 20 aa, Artificial sequence
  Synthetic peptide
VVTQGHCTLWPWMCPPQRWR

SEQ ID NO: 1187 - protein, 20 aa, Artificial sequence
  Synthetic peptide
IYPHDQCTRWPWMCPPQPYP

SEQ ID NO: 1188 - protein, 20 aa, Artificial sequence
  Synthetic peptide
SYWQGQCTRWPWMCPPQWRG

SEQ ID NO: 1189 - protein, 20 aa, Artificial sequence
  Synthetic peptide
MWQQGHCTRWPWMCPPQGWG

SEQ ID NO: 1190 - protein, 20 aa, Artificial sequence
  Synthetic peptide
EFTQWHCTRWPWMCPPQRSQ

SEQ ID NO: 1191 - protein, 20 aa, Artificial sequence
  Synthetic peptide
LDDQWQCTRWPWMCPPQGFS

SEQ ID NO: 1192 - protein, 20 aa, Artificial sequence
  Synthetic peptide
YQTQGLCTRWPWMCPPQSQR

SEQ ID NO: 1193 - protein, 20 aa, Artificial sequence
  Synthetic peptide
ESNQGQCTRWPWMCPPQGGW

SEQ ID NO: 1194 - protein, 20 aa, Artificial sequence
  Synthetic peptide
WTDRGPCTRWPWMCPPQANG

SEQ ID NO: 1195 - protein, 20 aa, Artificial sequence
  Synthetic peptide
VGTQGQCTRWPWMCPPYETG

SEQ ID NO: 1196 - protein, 20 aa, Artificial sequence
  Synthetic peptide
PYEQGKCTRWPWMCPPYEVE

SEQ ID NO: 1197 - protein, 20 aa, Artificial sequence
  Synthetic peptide
SEYQGLCTRWPWMCPPQGWK

SEQ ID NO: 1198 - protein, 20 aa, Artificial sequence
  Synthetic peptide
TFSQGHCTRWPWMCPPQGWG

SEQ ID NO: 1199 - protein, 20 aa, Artificial sequence
  Synthetic peptide
PGAHDHCTRWPWMCPPQSRY

SEQ ID NO: 1200 - protein, 20 aa, Artificial sequence
  Synthetic peptide
VAEEWHCRRWPWMCPPQDWR

SEQ ID NO: 1201 - protein, 20 aa, Artificial sequence
  Synthetic peptide
VGTQGHCTRWPWMCPPQPAG

SEQ ID NO: 1202 - protein, 20 aa, Artificial sequence
  Synthetic peptide
EEDQAHCRSWPWMCPPQGWV

SEQ ID NO: 1203 - protein, 20 aa, Artificial sequence
  Synthetic peptide
ADTQGHCTRWPWMCPPQHWF

SEQ ID NO: 1204 - protein, 20 aa, Artificial sequence
  Synthetic peptide
SGPQGHCTRWPWMCAPQGWF

SEQ ID NO: 1205 - protein, 20 aa, Artificial sequence
  Synthetic peptide
TLVQGHCTRWPWMCPPQRWV

SEQ ID NO: 1206 - protein, 20 aa, Artificial sequence
  Synthetic peptide
GMAHGKCTRWAWMCPPQSWK

SEQ ID NO: 1207 - protein, 20 aa, Artificial sequence
  Synthetic peptide
ELYHGQCTRWPWMCPPQSWA

SEQ ID NO: 1208 - protein, 20 aa, Artificial sequence
  Synthetic peptide
VADHGHCTRWPWMCPPQGWG

SEQ ID NO: 1209 - protein, 20 aa, Artificial sequence
  Synthetic peptide
PESQGHCTRWPWMCPPQGWG

SEQ ID NO: 1210 - protein, 20 aa, Artificial sequence
  Synthetic peptide
IPAHGHCTRWPWMCPPQRWR

SEQ ID NO: 1211 - protein, 20 aa, Artificial sequence
  Synthetic peptide
FTVHGHCTRWPWMCPPYGWV

SEQ ID NO: 1212 - protein, 20 aa, Artificial sequence
  Synthetic peptide
PDFPGHCTRWRWMCPPQGWE

SEQ ID NO: 1213 - protein, 20 aa, Artificial sequence
  Synthetic peptide
QLWQGPCTQWPWMCPPKGRY

SEQ ID NO: 1214 - protein, 20 aa, Artificial sequence
  Synthetic peptide
HANDGHCTRWQWMCPPQWGG

SEQ ID NO: 1215 - protein, 20 aa, Artificial sequence
  Synthetic peptide
ETDHGLCTRWPWMCPPYGAR

SEQ ID NO: 1216 - protein, 20 aa, Artificial sequence
  Synthetic peptide
GTWQGLCTRWPWMCPPQGWQ

SEQ ID NO: 1217 - protein, 20 aa, Artificial sequence
  Synthetic peptide
VATQGQCTRWPWMCPPQGWG

SEQ ID NO: 1218 - protein, 20 aa, Artificial sequence
  Synthetic peptide
VATQGQCTRWPWMCPPQRWG

SEQ ID NO: 1219 - protein, 20 aa, Artificial sequence
  Synthetic peptide
QREWYPCYGGHLWCYDLHKA

SEQ ID NO: 1220 - protein, 20 aa, Artificial sequence
  Synthetic peptide
ISAWYSCYAGHFWCWDLKQK

SEQ ID NO: 1221 - protein, 20 aa, Artificial sequence
  Synthetic peptide
WTGWYQCYGGHLWCYDLRRK

SEQ ID NO: 1222 - protein, 20 aa, Artificial sequence
  Synthetic peptide
KTFWYPCYDGHFWCYNLKSS

SEQ ID NO: 1223 - protein, 20 aa, Artificial sequence
  Synthetic  peptide
ESRWYPCYEGHLWCFDLTET

SEQ ID NO: 1224 - protein, 20 aa, Artificial sequence
  Synthetic peptide
MEMLDSLFELLKDMVPISKA

SEQ ID NO: 1225 - protein, 22 aa, Artificial sequence
  Synthetic peptide
RMEMLESLLELLKEIVPMSKAG

SEQ ID NO: 1226 - protein, 22 aa, Artificial sequence
  Synthetic peptide
RMEMLESLLELLKEIVPMSKAR

SEQ ID NO: 1227 - protein, 22 aa, Artificial sequence
  Synthetic peptide
RMEMLESLLELLKDIVPMSKPS

SEQ ID NO: 1228 - protein, 22 aa, Artificial sequence
  Synthetic peptide
GMEMLESLFELLQEIVPMSKAP

SEQ ID NO: 1229 - protein, 22 aa, Artificial sequence
  Synthetic peptide
RMEMLESLLELLKDIVPISNPP

SEQ ID NO: 1230 - protein, 22 aa, Artificial sequence
  Synthetic peptide
RIEMLESLLELLQEIVPISKAE

SEQ ID NO: 1231 - protein, 22 aa, Artificial sequence
  Synthetic peptide
RMEMLQSLLELLKDIVPMSNAR

SEQ ID NO: 1232 - protein, 22 aa, Artificial sequence
  Synthetic peptide
RMEMLESLLELLKEIVPTSNGT

SEQ ID NO: 1233 - protein, 22 aa, Artificial sequence
  Synthetic peptide
RMEMLESLFELLKEIVPMSKAG

SEQ ID NO: 1234 - protein, 22 aa, Artificial sequence
  Synthetic peptide
RMEMLGSLLELLKEIVPMSKAR

SEQ ID NO: 1235 - protein, 22 aa, Artificial sequence
  Synthetic peptide
QMELLDSLFELLKEIVPKSQPA

SEQ ID NO: 1236 - protein, 22 aa, Artificial sequence
  Synthetic peptide
RMEMLDSLLELLKEIVPMSNAR

SEQ ID NO: 1237 - protein, 22 aa, Artificial sequence
  Synthetic peptide
RMEMLESLLELLHEIVPMSQAG

SEQ ID NO: 1238 - protein, 22 aa, Artificial sequence
  Synthetic peptide
QMEMLESLLQLLKEIVPMSKAS

SEQ ID NO: 1239 - protein, 22 aa, Artificial sequence
  Synthetic peptide
RMEMLDSLLELLKDMVPMTTGA

SEQ ID NO: 1240 - protein, 22 aa, Artificial sequence
  Synthetic peptide
RIEMLESLLELLKDMVPMANAS

SEQ ID NO: 1241 - protein, 22 aa, Artificial sequence
  Synthetic peptide
RMEMLESLLQLLNEIVPMSRAR

SEQ ID NO: 1242 - protein, 22 aa, Artificial sequence
  Synthetic peptide
RMEMLESLFDLLKELVPMSKGV

SEQ ID NO: 1243 - protein, 22 aa, Artificial sequence
  Synthetic peptide
RIEMLESLLELLKDIVPIQKAR

SEQ ID NO: 1244 - protein, 22 aa, Artificial sequence
  Synthetic peptide
RMELLESLFELLKDMVPMSDSS

SEQ ID NO: 1245 - protein, 22 aa, Artificial sequence
  Synthetic peptide
RMEMLESLLEVLQEIVPRAKGA

SEQ ID NO: 1246 - protein, 22 aa, Artificial sequence
  Synthetic peptide
RMEMLDSLLQLLNEIVPMSHAR

SEQ ID NO: 1247 - protein, 22 aa, Artificial sequence
  Synthetic peptide
RMEMLESLLELLKDIVPMSNAG

SEQ ID NO: 1248 - protein, 22 aa, Artificial sequence
  Synthetic peptide
RMEMLQSLFELLKGMVPISKAG

SEQ ID NO: 1249 - protein, 22 aa, Artificial sequence
  Synthetic peptide
RMEMLESLLELLKEIVPNSTAA

SEQ ID NO: 1250 - protein, 22 aa, Artificial sequence
  Synthetic peptide
RMEMLQSLLELLKEIVPISKAG

SEQ ID NO: 1251 - protein, 22 aa, Artificial sequence
  Synthetic peptide
RIEMLDSLLELLNELVPMSKAR

SEQ ID NO: 1252 - protein, 20 aa, Artificial sequence
  Synthetic peptide
HHGWNYLRKGSAPQWFEAWV

SEQ ID NO: 1253 - protein, 22 aa, Artificial sequence
  Synthetic peptide
QVESLQQLLMWLDQKLASGPQG

SEQ ID NO: 1254 - protein, 22 aa, Artificial sequence
  Synthetic peptide
RMELLESLFELLKEMVPRSKAV

SEQ ID NO: 1255 - protein, 22 aa, Artificial sequence
  Synthetic peptide
QAVSLQHLLMWLDQKLASGPQH

SEQ ID NO: 1256 - protein, 22 aa, Artificial sequence
  Synthetic peptide
DEDSLQQLLMWLDQKLASGPQL

SEQ ID NO: 1257 - protein, 22 aa, Artificial sequence
  Synthetic peptide
PVASLQQLLIWLDQKLAQGPHA

SEQ ID NO: 1258 - protein, 22 aa, Artificial sequence
  Synthetic peptide
EVDELQQLLNWLDHKLASGPLQ

SEQ ID NO: 1259 - protein, 22 aa, Artificial sequence
  Synthetic peptide
DVESLEQLLMWLDHQLASGPHG

SEQ ID NO: 1260 - protein, 22 aa, Artificial sequence
  Synthetic peptide
QVDSLQQVLLWLEHKLALGPQV

SEQ ID NO: 1261 - protein, 22 aa, Artificial sequence
  Synthetic peptide
GDESLQHLLMWLEQKLALGPHG

SEQ ID NO: 1262 - protein, 22 aa, Artificial sequence
  Synthetic peptide
QIEMLESLLDLLRDMVPMSNAF

SEQ ID NO: 1263 - protein, 22 aa, Artificial sequence
  Synthetic peptide
EVDSLQQLLMWLDQKLASGPQA

SEQ ID NO: 1264 - protein, 22 aa, Artificial sequence
  Synthetic peptide
EDESLQQLLIYLDKMLSSGPQV

SEQ ID NO: 1265 - protein, 22 aa, Artificial sequence
  Synthetic peptide
AMDQLHQLLIWLDHKLASGPQA

SEQ ID NO: 1266 - protein, 22 aa, Artificial sequence
  Synthetic peptide
RIEMLESLLELLDEIALIPKAW

SEQ ID NO: 1267 - protein, 22 aa, Artificial sequence
  Synthetic peptide
EVVSLQHLLMWLEHKLASGPDG

SEQ ID NO: 1268 - protein, 22 aa, Artificial sequence
  Synthetic peptide
GGESLQQLLMWLDQQLASGPQR

SEQ ID NO: 1269 - protein, 22 aa, Artificial sequence
  Synthetic peptide
GVESLQQLLIFLDHMLVSGPHD

SEQ ID NO: 1270 - protein, 22 aa, Artificial sequence
  Synthetic peptide
NVESLEHLMMWLERLLASGPYA

SEQ ID NO: 1271 - protein, 22 aa, Artificial sequence
  Synthetic peptide
QVDSLQQLLIWLDHQLASGPKR

SEQ ID NO: 1272 - protein, 22 aa, Artificial sequence
  Synthetic peptide
EVESLQQLLMWLEHKLAQGPQG

SEQ ID NO: 1273 - protein, 22 aa, Artificial sequence
  Synthetic peptide
EVDSLQQLLMWLDQKLASGPHA

SEQ ID NO: 1274 - protein, 22 aa, Artificial sequence
  Synthetic peptide
EVDSLQQLLMWLDQQLASGPQK

SEQ ID NO: 1275 - protein, 22 aa, Artificial sequence
  Synthetic peptide
GVEQLPQLLMWLEQKLASGPQR

SEQ ID NO: 1276 - protein, 22 aa, Artificial sequence
  Synthetic peptide
GEDSLQQLLMWLDQQLAAGPQV

SEQ ID NO: 1277 - protein, 22 aa, Artificial sequence
  Synthetic peptide
ADDSLQQLLMWLDRKLASGPHV

SEQ ID NO: 1278 - protein, 22 aa, Artificial sequence
  Synthetic peptide
PVDSLQQLLIWLDQKLASGPQG

SEQ ID NO: 1279 - protein, 18 aa, Artificial sequence
  Synthetic peptide
RATLLKDFWQLVEGYGDN

SEQ ID NO: 1280 - protein, 22 aa, Artificial sequence
  Synthetic peptide
DWRATLLKEFWQLVEGLGDNLV

SEQ ID NO: 1281 - protein, 22 aa, Artificial sequence
  Synthetic peptide
QSRATLLKEFWQLVEGLGDKQA

SEQ ID NO: 1282 - protein, 22 aa, Artificial sequence
  Synthetic peptide
DGRATLLTEFWQLVQGLGQKEA

SEQ ID NO: 1283 - protein, 22 aa, Artificial sequence
  Synthetic peptide
LARATLLKEFWQLVEGLGEKVV

SEQ ID NO: 1284 - protein, 22 aa, Artificial sequence
  Synthetic peptide
GSRDTLLKEFWQLVVGLGDMQT

SEQ ID NO: 1285 - protein, 22 aa, Artificial sequence
  Synthetic peptide
DARATLLKEFWQLVDAYGDRMV

SEQ ID NO: 1286 - protein, 22 aa, Artificial sequence
  Synthetic peptide
NDRAQLLRDFWQLVDGLGVKSW

SEQ ID NO: 1287 - protein, 22 aa, Artificial sequence
  Synthetic peptide
GVRETLLYELWYLLKGLGANQG

SEQ ID NO: 1288 - protein, 22 aa, Artificial sequence
  Synthetic peptide
QARATLLKEFCQLVGCQGDKLS

SEQ ID NO: 1289 - protein, 22 aa, Artificial sequence
  Synthetic peptide
QERATLLKEFWQLVAGLGQNMR

SEQ ID NO: 1290 - protein, 22 aa, Artificial sequence
  Synthetic peptide
SGRATLLKEFWQLVQGLGEYRW

SEQ ID NO: 1291 - protein, 22 aa, Artificial sequence
  Synthetic peptide
TMRATLLKEFWLFVDGQREMQW

SEQ ID NO: 1292 - protein, 22 aa, Artificial sequence
  Synthetic peptide
GERATLLNDFWQLVDGQGDNTG

SEQ ID NO: 1293 - protein, 22 aa, Artificial sequence
  Synthetic peptide
DERETLLKEFWQLVHGWGDNVA

SEQ ID NO: 1294 - protein, 22 aa, Artificial sequence
  Synthetic peptide
GGRATLLKELWQLLEGQGANLV

SEQ ID NO: 1295 - protein, 22 aa, Artificial sequence
  Synthetic peptide
TARATLLNELVQLVKGYGDKLV

SEQ ID NO: 1296 - protein, 22 aa, Artificial sequence
  Synthetic peptide
GMRATLLQEFWQLVGGQGDNWM

SEQ ID NO: 1297 - protein, 22 aa, Artificial sequence
  Synthetic peptide
STRATLLNDLWQLMKGWAEDRG

SEQ ID NO: 1298 - protein, 22 aa, Artificial sequence
  Synthetic peptide
SERATLLKELWQLVGGWGDNFG

SEQ ID NO: 1299 - protein, 22 aa, Artificial sequence
  Synthetic peptide
VGRATLLKEFWQLVEGLVGQSR

SEQ ID NO: 1300 - protein, 22 aa, Artificial sequence
  Synthetic peptide
EIRATLLKEFWQLVDEWREQPN

SEQ ID NO: 1301 - protein, 22 aa, Artificial sequence
  Synthetic peptide
QLRATLLKEFLQLVHGLGETDS

SEQ ID NO: 1302 - protein, 22 aa, Artificial sequence
  Synthetic peptide
TQRATLLKEFWQLIEGLGGKHV

SEQ ID NO: 1303 - protein, 22 aa, Artificial sequence
  Synthetic peptide
HYRATLLKEFWQLVDGLREQGV

SEQ ID NO: 1304 - protein, 22 aa, Artificial sequence
  Synthetic peptide
QSRVTLLREFWQLVESYRPIVN

SEQ ID NO: 1305 - protein, 22 aa, Artificial sequence
  Synthetic peptide
LSRATLLNEFWQFVDGQRDKRM

SEQ ID NO: 1306 - protein, 22 aa, Artificial sequence
  Synthetic peptide
WDRATLLNDFWHLMEELSQKPG

SEQ ID NO: 1307 - protein, 22 aa, Artificial sequence
  Synthetic peptide
QERATLLKEFWRMVEGLGKNRG

SEQ ID NO: 1308 - protein, 22 aa, Artificial sequence
  Synthetic peptide
NERATLLREFWQLVGGYGVNQR

SEQ ID NO: 1309 - protein, 20 aa, Artificial sequence
  Synthetic peptide
YREMSMLEGLLDVLERLQHY

SEQ ID NO: 1310 - protein, 22 aa, Artificial sequence
  Synthetic peptide
HQRDMSMLWELLDVLDGLRQYS

SEQ ID NO: 1311 - protein, 22 aa, Artificial sequence
  Synthetic peptide
TQRDMSMLDGLLEVLDQLRQQR

SEQ ID NO: 1312 - protein, 22 aa, Artificial sequence
  Synthetic peptide
TSRDMSLLWELLEELDRLGHQR

SEQ ID NO: 1313 - protein, 22 aa, Artificial sequence
  Synthetic peptide
MQHDMSMLYGLVELLESLGHQI

SEQ ID NO: 1314 - protein, 22 aa, Artificial sequence
  Synthetic peptide
WNRDMRMLESLFEVLDGLRQQV

SEQ ID NO: 1315 - protein, 22 aa, Artificial sequence
  Synthetic peptide
GYRDMSMLEGLLAVLDRLGPQL

SEQ ID NO: 1316 - protein, 22 aa, Artificial sequence
  Synthetic peptide
TQRDMSMLEGLLEVLDRLGQQR

SEQ ID NO: 1317 - protein, 22 aa, Artificial sequence
  Synthetic peptide
WYRDMSMLEGLLEVLDRLGQQR

SEQ ID NO: 1318 - protein, 20 aa, Artificial sequence
  Synthetic peptide
HNSSQMLLSELIMLVGSMMQ

SEQ ID NO: 1319 - protein, 22 aa, Artificial sequence
  Synthetic peptide
TQNSRQMLLSDFMMLVGSMIQG

SEQ ID NO: 1320 - protein, 22 aa, Artificial sequence
  Synthetic peptide
MQTSRHILLSEFMMLVGSIMHG

SEQ ID NO: 1321 - protein, 22 aa, Artificial sequence
  Synthetic peptide
HDNSRQMLLSDLLHLVGTMIQG

SEQ ID NO: 1322 - protein, 22 aa, Artificial sequence
  Synthetic peptide
MENSRQNLLRELIMLVGNMSHQ

SEQ ID NO: 1323 - protein, 22 aa, Artificial sequence
  Synthetic peptide
QDTSRHMLLREFMMLVGEMIQG

SEQ ID NO: 1324 - protein, 22 aa, Artificial sequence
  Synthetic peptide
DQNSRQMLLSDLMILVGSMIQG

SEQ ID NO: 1325 - protein, 20 aa, Artificial sequence
  Synthetic peptide
EFFHWLHNHRSEVNHWLDMN

SEQ ID NO: 1326 - protein, 22 aa, Artificial sequence
  Synthetic peptide
NVFFQWVQKHGRVVYQWLDINV

SEQ ID NO: 1327 - protein, 22 aa, Artificial sequence
  Synthetic peptide
FDFLQWLQNHRSEVEHWLVMDV

SEQ ID NO: 1328 - protein, 56 aa, Artificial sequence
  Synthetic peptide
MGAQWYPCYEGHFWCYDLGSGSATGGSGSTASSGSGSATGWYPCYEGHFWCYDLLE

SEQ ID NO: 1329 - protein, 54 aa, Artificial sequence
  Synthetic peptide
AQWYPCYEGHFWCYDLGSGSATGGSGSTASSGSGSATGWYPCYEGHFWCYDLLE

SEQ ID NO: 1330 - protein, 56 aa, Artificial sequence
  Synthetic peptide
MGAQIFGCKWWDVQCYQFGSGSATGGSGSTASSGSGSATGIFGCKWWDVQCYQFLE

SEQ ID NO: 1331 - protein, 54 aa, Artificial sequence
  Synthetic peptide
AQIFGCKWWDVQCYQFGSGSATGGSGSTASSGSGSATGIFGCKWWDVQCYQFLE

SEQ ID NO: 1332 - protein, 56 aa, Artificial sequence
  Synthetic peptide
MGAQIFGCKWWDVDCYQFGSGSATGGSGSTASSGSGSATGIFGCKWWDVDCYQFLE

SEQ ID NO: 1333 - protein, 54 aa, Artificial sequence
  Synthetic peptide
AQIFGCKWWDVDCYQFGSGSATGGSGSTASSGSGSATGIFGCKWWDVDCYQFLE

SEQ ID NO: 1334 - protein, 68 aa, Artificial sequence
  Synthetic peptide
AQLADHGQCIRWPWMCPPEGWELEGSGSATGGSGSTASSGSGSATGLADHGQCIRWPWMCPPEGWELE

SEQ ID NO: 1335 - protein, 64 aa, Artificial sequence
  Synthetic peptide
AQLADHGQCIRWPWMCPPEGWEGSGSATGGSGGGASSGSGSATGLADHGQCIRWPWMCPPEGWE

SEQ ID NO: 1336 - protein, 68 aa, Artificial sequence
  Synthetic peptide
AQSEYQGLCTRWPWMCPPQGWKLEGSGSATGGSGSTASSGSGSATGSEYQGLCTRWPWMCPPQGWKLE

SEQ ID NO: 1337 - protein, 64 aa, Artificial sequence
  Synthetic peptide
AQSEYQGLCTRWPWMCPPQGWKGSGSATGGSGGGASSGSGSATGSEYQGLCTRWPWMCPPQGWK

SEQ ID NO: 1338 - protein, 67 aa, Artificial sequence
  Synthetic peptide
AQTFSQGHCTRWPWMCPPQGWGLEGSGSATGGSGSTASSGSGSATGTFSQGHCTRWPWMCPPQGWGL

SEQ ID NO: 1339 - protein, 68 aa, Artificial sequence
  Synthetic peptide
AQVADHGHCTRWPWMCPPQGWGLEGSGSATGGSGSTASSGSGSATGVADHGHCTRWPWMCPPQGWGLE

SEQ ID NO: 1340 - protein, 64 aa, Artificial sequence
  Synthetic peptide
AQVADHGHCTRWPWMCPPQGWGGSGSATGGSGGGASSGSGSATGVADHGHCTRWPWVCPPQGWG

SEQ ID NO: 1341 - protein, 68 aa, Artificial sequence
  Synthetic peptide
AQPESQGHCTRWPWMCPPQGWGLEGSGSATGGSGSTASSGSGSATGPESQGHCTRWPWMCPPQGWGLE

SEQ ID NO: 1342 - protein, 64 aa, Artificial sequence
  Synthetic peptide
AQPESQGHCTRWPWMCPPQGWGGSGSATGGSGGGASSGSGSATGPESQGHCTRWPWMCPPQGWG

SEQ ID NO: 1343 - skipped

SEQ ID NO: 1344 - protein, 9 aa, Artificial sequence
  Synthetic peptide
CLCRGDCIC

SEQ ID NO: 1345 - protein, 8 aa, Artificial sequence
  Synthetic peptide
CWDDGWLC

SEQ ID NO: 1346 - protein, 9 aa, Artificial sequence
  Synthetic peptide
CWDDLWWLC

SEQ ID NO: 1347 - protein, 8 aa, Artificial sequence
  Synthetic peptide
CWDDGLMC

SEQ ID NO: 1348 - protein, 8 aa, Artificial sequence
  Synthetic peptide
CWDDGWMC

SEQ ID NO: 1349 - protein, 9 aa, Artificial sequence
  Synthetic peptide
CSWDDGWLC

SEQ ID NO: 1350 - protein, 9 aa, Artificial sequence
  Synthetic peptide
CPDDLWWLC

SEQ ID NO: 1351 - protein, 3 aa, Artificial sequence
  Synthetic peptide
NGR

SEQ ID NO: 1352 - protein, 3 aa, Artificial sequence
  Synthetic peptide
GSL

SEQ ID NO: 1353 - protein, 3 aa, Artificial sequence
  Synthetic peptide
RGD

SEQ ID NO: 1354 - protein, 13 aa, Artificial sequence
  Synthetic peptide
CGRECPRLCQSSC

SEQ ID NO: 1355 - protein, 13 aa, Artificial sequence
  Synthetic peptide
CNGRCVSGCAGRC

SEQ ID NO: 1356 - protein, 8 aa, Artificial sequence
  Synthetic peptide
CLSGSLSC

SEQ ID NO: 1357 - protein, 3 aa, Artificial sequence
  Synthetic peptide
GSL

SEQ ID NO: 1358 - protein, 6 aa, Artificial sequence
  Synthetic peptide
NGRAHA

SEQ ID NO: 1359 - protein, 5 aa, Artificial sequence
  Synthetic peptide
CNGRC

SEQ ID NO: 1360 - protein, 9 aa, Artificial sequence
  Synthetic peptide
CDCRGDCFC

SEQ ID NO: 1361 - protein, 7 aa, Artificial sequence
  Synthetic peptide
CGSLVRC

SEQ ID NO: 1362 - protein, 5 aa, Artificial sequence
  Synthetic peptide
  Misc feature (3)..(4): Xaa=any amino acid
DLXXL

SEQ ID NO: 1363 - protein, 12 aa, Artificial sequence
  Synthetic peptide
RTDLDSLRTYTL

SEQ ID NO: 1364 - protein, 10 aa, Artificial sequence
  Synthetic peptide
RTDLDSLRTY

SEQ ID NO: 1365 - protein, 9 aa, Artificial sequence
  Synthetic peptide
RTDLDSLRT

SEQ ID NO: 1366 - protein, 8 aa, Artificial sequence
  Synthetic peptide
RTDLDSLR

SEQ ID NO: 1367 - protein, 12 aa, Artificial sequence
  Synthetic peptide
GDLDLLKLRLTL

SEQ ID NO: 1368 - protein, 12 aa, Artificial sequence
  Synthetic peptide
GDLHSLRQLLSR

SEQ ID NO: 1369 - protein, 12 aa, Artificial sequence
  Synthetic peptide
RDDLHMLRLQLW

SEQ ID NO: 1370 - protein, 12 aa, Artificial sequence
  Synthetic peptide
SSDLHALKKRYG

SEQ ID NO: 1371 - protein, 12 aa, Artificial sequence
  Synthetic peptide
RGDLKQLSELTW

SEQ ID NO: 1372 - protein, 7 aa, Artificial sequence
  Synthetic peptide
  Misc feature (2)..(3): Xaa=any amino acid
CXXRGDC

SEQ ID NO: 1373 - protein, 27 aa, Artificial sequence
  Synthetic peptide
STGGFDDVYDWARGVSSALTTTLVATR

SEQ ID NO: 1374 - protein, 27 aa, Artificial sequence
  Synthetic peptide
STGGFDDVYDWARRVSSALTTTLVATR

SEQ ID NO: 1375 - protein, 30 aa, Artificial sequence; identical to SEQ ID NO: 941
  Synthetic peptide

SEQ ID NO: 1376 - protein, 30 aa, Artificial sequence; identical to SEQ ID NO: 942
  Synthetic peptide

SEQ ID NO: 1377 - protein, 31 aa, Artificial sequence; identical to SEQ ID NO: 943
  Synthetic peptide

SEQ ID NO: 1378 - protein, 31 aa, Artificial sequence; identical to SEQ ID NO: 944
  Synthetic peptide

SEQ ID NO: 1379 - protein, 18 aa, Artificial sequence
  Synthetic peptide
DVYTKKELIECARRVSEK

SEQ ID NO: 1380 - protein, 5 aa, Artificial sequence
  Synthetic peptide
  Misc feature (5)..(5): Xaa=any amino acid
RGDGX

SEQ ID NO: 1381 - protein, 7 aa, Artificial sequence
  Synthetic peptide
  Misc feature (6)..(6): Xaa=any amino acid
CRGDGXC

SEQ ID NO: 1382 - protein, 9 aa, Artificial sequence
  Synthetic peptide
CARRLDAPC

SEQ ID NO: 1383 - protein, 9 aa, Artificial sequence
  Synthetic peptide
CPSRLDSPC

SEQ ID NO: 1384 - protein, 9 aa, Artificial sequence
  Synthetic peptide
CDCRGDCFC

SEQ ID NO: 1385 - protein, 9 aa, Artificial sequence
  Synthetic peptide
CDCRGDCLC

SEQ ID NO: 1386 - protein, 12 aa, Artificial sequence
  Synthetic peptide
RGDLAALSAPPV

SEQ ID NO: 1387 - protein, 12 aa, Artificial sequence
  Synthetic peptide
DITWDQLWDLMK

SEQ ID NO: 1388 - protein, 12 aa, Artificial sequence
  Synthetic peptide
DITWDELWKIMN

SEQ ID NO: 1389 - protein, 12 aa, Artificial sequence
  Synthetic peptide
DYTWFELWDMMQ

SEQ ID NO: 1390 - protein, 12 aa, Artificial sequence
  Synthetic peptide
QITWAQLWNMMK

SEQ ID NO: 1391 - protein, 12 aa, Artificial sequence
  Synthetic peptide
DMTWHDLWTLMS

SEQ ID NO: 1392 - protein, 12 aa, Artificial sequence
  Synthetic peptide
DYSWHDLWEMMS

SEQ ID NO: 1393 - protein, 12 aa, Artificial sequence
  Synthetic peptide
EITWDQLWEVMN

SEQ ID NO: 1394 - protein, 12 aa, Artificial sequence
  Synthetic peptide
HVSWEQLWDIMN

SEQ ID NO: 1395 - protein, 12 aa, Artificial sequence
  Synthetic peptide
HITWDQLWRIMT

SEQ ID NO: 1396 - protein, 13 aa, Artificial sequence
  Synthetic peptide
RNMSWLELWEHMK

SEQ ID NO: 1397 - protein, 18 aa, Artificial sequence
  Synthetic peptide
AEWTWDQLWHVMNPAESQ

SEQ ID NO: 1398 - protein, 14 aa, Artificial sequence
  Synthetic peptide
HRAEWLALWEQMSP

SEQ ID NO: 1399 - protein, 14 aa, Artificial sequence
  Synthetic peptide
KKEDWLALWRIMSV

SEQ ID NO: 1400 - protein, 11 aa, Artificial sequence
  Synthetic peptide
ITWDQLWDLMK

SEQ ID NO: 1401 - protein, 12 aa, Artificial sequence
  Synthetic peptide
DITWDQLWDLMK

SEQ ID NO: 1402 - protein, 12 aa, Artificial sequence
  Synthetic peptide
DITWDQLWDLMK

SEQ ID NO: 1403 - protein, 12 aa, Artificial sequence
  Synthetic peptide
DITWDQLWDLMK

SEQ ID NO: 1404 - protein, 16 aa, Artificial sequence
  Synthetic peptide
CQNRYTDLVAIQNKNE

SEQ ID NO: 1405 - protein, 17 aa, Artificial sequence
  Synthetic peptide
AENWADNEPNNKRNNED

SEQ ID NO: 1406 - protein, 19 aa, Artificial sequence
  Synthetic peptide
RKNNKTWTWVGTKKALTNE

SEQ ID NO: 1407 - protein, 13 aa, Artificial sequence
  Synthetic peptide
KKALTNEAENWAD

SEQ ID NO: 1408 - protein, 16 aa, Artificial sequence
  Synthetic peptide
  Misc feature (3)..(3): Xaa=any amino acid
  Misc feature (15)..(15): Xaa=any amino acid
CQXRYTDLVAIQNKXE

SEQ ID NO: 1409 - protein, 17 aa, Artificial sequence
  Synthetic peptide
  Misc feature (13)..(13): Xaa=any amino acid
  Misc feature (15)..(15): Xaa=any amino acid
AENWADGEPNNKXNXED

SEQ ID NO: 1410 - protein, 30 aa, Artificial sequence; identical to SEQ ID NO: 942
  Synthetic peptide

SEQ ID NO: 1411 - protein, 31 aa, Artificial sequence; identical to SEQ ID NO: 943
  Synthetic peptide

SEQ ID NO: 1412 - protein, 31 aa, Artificial sequence; identical to SEQ ID NO: 944
  Synthetic peptide

SEQ ID NO: 1413 - protein, 18 aa, Artificial sequence
  Synthetic peptide
DVYTKKELIECARRVSEK

SEQ ID NO: 1414 - protein, 27 aa, Artificial sequence
  Synthetic peptide
STGGFDDVYDWARGVSSALTTTLVATR

SEQ ID NO: 1415 - protein, 27 aa, Artificial sequence
  Synthetic peptide
STGGFDDVYDWARRVSSALTTTLVATR

SEQ ID NO: 1416 - protein, 30 aa, Artificial sequence; identical to SEQ ID NO: 941
  Synthetic peptide

SEQ ID NO: 1417 - protein, 20 aa, Artificial sequence
  Synthetic peptide
YIGSRYIGSRYIGSRYIGSR

SEQ ID NO: 1418 - protein, 45 aa, Artificial sequence
  Synthetic peptide
YIGSRYIGSRYIGSRYIGSRYIGSRYIGSRYIGSRYIGSRYIGSR

SEQ ID NO: 1419 - protein, 80 aa, Artificial sequence
  Synthetic peptide
YIGSRYIGSRYIGSRYIGSRYIGSRYIGSRYIGSRYIGSRYIGSRYIGSRYIGSRYIGSRYIGSRYIGSRYIGSRYIGSR

SEQ ID NO: 1420 - protein, 125 aa, Artificial sequence
  Synthetic peptide
YIGSRYIGSRYIGSRYIGSRYIGSRYIGSRYIGSRYIGSRYIGSRYIGSRYIGSRYIGSRYIGSRYIGSRYIGSRYIGSRYIGSRYIGSRYIGSRYIGSRYIGSRYIGSRYIGSRYIGSRYIGSR

SEQ ID NO: 1421 - protein, 20 aa, Artificial sequence
  Synthetic peptide
IPCNNKGAHSVGLMWWMLAR

SEQ ID NO: 1422 - protein, 19 aa, Artificial sequence
  Synthetic peptide
YIGSRREDVEILDVPDSGR

SEQ ID NO: 1423 - protein, 14 aa, Artificial sequence
  Synthetic peptide
RGDRGDYIGSRRGD

SEQ ID NO: 1424 - protein, 25 aa, Artificial sequence
  Synthetic peptide
YIGSRYIGSRYIGSRYIGSRYIGSR

SEQ ID NO: 1425 - protein, 19 aa, Artificial sequence
  Synthetic peptide
REDVEILDVYIGSRPDSGR

SEQ ID NO: 1426 - protein, 19 aa, Artificial sequence
  Synthetic peptide
YIGSRREDVEILDVPDSGR

SEQ ID NO: 1427 - protein, 20 aa, Artificial sequence
  Synthetic peptide
TGYTEYTEEWPMGFGYQWSF

SEQ ID NO: 1428 - protein, 20 aa, Artificial sequence
  Synthetic peptide
TDWLSDFPFYEQYFGLMPPG

SEQ ID NO: 1429 - protein, 20 aa, Artificial sequence
  Synthetic peptide
FMRFPNPWKLVEPPQGWYYG

SEQ ID NO: 1430 - protein, 20 aa, Artificial sequence
  Synthetic peptide
VVKAPHFEFLAPPHFHEFPF

SEQ ID NO: 1431 - protein, 20 aa, Artificial sequence
  Synthetic peptide
FSYIWIDETPSNIDRYMLWL

SEQ ID NO: 1432 - protein, 20 aa, Artificial sequence
  Synthetic peptide
VNFPKVPEDVEPWPWSLKLY

SEQ ID NO: 1433 - protein, 20 aa, Artificial sequence
  Synthetic peptide
TWHPKTYEEFALPFFVPEAP

SEQ ID NO: 1434 - protein, 20 aa, Artificial sequence
  Synthetic peptide
WHFGTPYIQQQPGVYWLQAP

SEQ ID NO: 1435 - protein, 20 aa, Artificial sequence
  Synthetic peptide
VWNYGPFFMNFPDSTYFLHE

SEQ ID NO: 1436 - protein, 20 aa, Artificial sequence
  Synthetic peptide
WRIHSKPLDYSHVWFFPADF

SEQ ID NO: 1437 - protein, 20 aa, Artificial sequence
  Synthetic peptide
FWDGNQPPDILVDWPWNPPV

SEQ ID NO: 1438 - protein, 20 aa, Artificial sequence
  Synthetic peptide
FYSLEWLKDHSEFFQTVTEW

SEQ ID NO: 1439 - protein, 20 aa, Artificial sequence
  Synthetic peptide
QFMELLKFFNSPGDSSHHFL

SEQ ID NO: 1440 - protein, 20 aa, Artificial sequence
  Synthetic peptide
TNVDWISNNWEHMKSFFTED

SEQ ID NO: 1441 - protein, 20 aa, Artificial sequence
  Synthetic peptide
PNEKPYQMQSWFPPDWPVPY

SEQ ID NO: 1442 - protein, 20 aa, Artificial sequence
  Synthetic peptide
WSHTEWVPQVWWKPPNHFYV

SEQ ID NO: 1443 - protein, 20 aa, Artificial sequence
  Synthetic peptide
WGEWINDAQVHMHEGFISES

SEQ ID NO: 1444 - protein, 20 aa, Artificial sequence
  Synthetic peptide
VPWEHDHDLWEIISQDWHIA

SEQ ID NO: 1445 - protein, 20 aa, Artificial sequence
  Synthetic peptide
VLHLQDPRGWSNFPPGVLEL

SEQ ID NO: 1446 - protein, 14 aa, Artificial sequence
  Synthetic peptide
IHGCWFTEEGCVWQ

SEQ ID NO: 1447 - protein, 14 aa, Artificial sequence
  Synthetic peptide
YMQCQFARDGCPQW

SEQ ID NO: 1448 - protein, 14 aa, Artificial sequence
  Synthetic peptide
KLQCQYSESGCPTI

SEQ ID NO: 1449 - protein, 14 aa, Artificial sequence
  Synthetic peptide
FLQCEISGGACPAP

SEQ ID NO: 1450 - protein, 14 aa, Artificial sequence
  Synthetic peptide
KLQCEFSTSGCPDL

SEQ ID NO: 1451 - protein, 14 aa, Artificial sequence
  Synthetic peptide
KLQCEFSTQGCPDL

SEQ ID NO: 1452 - protein, 14 aa, Artificial sequence
  Synthetic peptide
KLQCEFSTSGCPWL

SEQ ID NO: 1453 - protein, 14 aa, Artificial sequence
  Synthetic peptide
IQGCWFTEEGCPWQ

SEQ ID NO: 1454 - protein, 18 aa, Artificial sequence
  Synthetic peptide
SFDCDNPWGHVLQSCFGF

SEQ ID NO: 1455 - protein, 18 aa, Artificial sequence
  Synthetic peptide
SFDCDNPWGHKLQSCFGF

SEQ ID NO: 1456 - protein, 18 aa, Artificial sequence
  Synthetic peptide
  BINDING (18)..(18): Linker protein bound to residue 18
LPGCKWDLLIKQWVCDPL

SEQ ID NO: 1457 - protein, 18 aa, Artificial sequence
  Synthetic peptide
  MISC FEATURE (1)..(1): Linker protein bound to residue 1
LPGCKWDLLIKQWVCDPL

SEQ ID NO: 1458 - protein, 36 aa, Artificial sequence
  Synthetic peptide
  Misc feature (18)..(19): Linker protein between residues 18 and 19
  Binding (36)..(36): Linker protein bound to residue 36
LPGCKWDLLIKQWVCDPLLPGCKWDLLIKQWVCDPL

SEQ ID NO: 1459 - protein, 36 aa, Artificial sequence; identical to SEQ ID NO: 1458
  Synthetic peptide
  Binding (1)..(1): Linker protein bound to residue 1
  Misc feature (18)..(19): Linker protein between residues 18 and 19

SEQ ID NO: 1460 - protein, 18 aa, Artificial sequence
  Synthetic peptide
  Binding (18)..(18): Linker protein bound to residue 18
SADCYFDILTKSDVCTSS

SEQ ID NO: 1461 - protein, 18 aa, Artificial sequence
  Synthetic peptide
  Binding (1)..(1): Linker protein bound to residue 1
SADCYFDILTKSDVCTSS

SEQ ID NO: 1462 - protein, 34 aa, Artificial sequence
  Synthetic peptide
  Misc feature (17)..(18): Linker protein between residues 17 and 18
  Binding (34)..(34): Linker protein bound to residue 34
SADCYFDILTKSDVTSSSADCYFDILTKSDVTSS

SEQ ID NO: 1463 - protein, 34 aa, Artificial sequence; identical to SEQ ID NO: 1462
  Synthetic peptide
  Binding (1)..(1): Linker protein bound to residue 1
  Misc feature (17)..(18): Linker protein between residues 17 and 18

SEQ ID NO: 1464 - protein, 18 aa, Artificial sequence
  Synthetic peptide
  Binding (18)..(18): Linker protein bound to residue 18
FHDCKWDLLTKQWVCHGL

SEQ ID NO: 1465 - protein, 18 aa, Artificial sequence
  Synthetic peptide
  Binding (1)..(1): Linker protein bound to residue 1
FHDCKWDLLTKQWVCHGL

SEQ ID NO: 1466 - protein, 36 aa, Artificial sequence
  Synthetic peptide
  Misc feature (18)..(19): Linker protein between residues 18 and 19
  Binding (36)..(36): Linker protein bound to residue 36
FHDCKWDLLTKQWVCHGLFHDCKWDLLTKQWVCHGL

SEQ ID NO: 1467 - protein, 36 aa, Artificial sequence; identical to SEQ ID NO: 1466
  Synthetic peptide
  Binding (1)..(1): Linker protein bound to residue 1
  Misc feature (18)..(19): Linker protein between residues 18 and 19

SEQ ID NO: 1468 - protein, 248 aa, Artificial sequence
  Synthetic peptide
MPGTCFPFPWECTHAGGGGGVDKTHTCPPCPAPELLGGPSVFLFPPKPKDTLMISRTPEVTCVVVDVSHEDPEVKFNWYVDGVEVHNAKTKPREEQYNSTYRVVSVLTVLHQDWLNGKEYKCKVSNKALPAPIEKTISKAKGQPREPQVYTLPPSRDELTKNQVSLTCLVKGFYPSDIAVEWESNGQPENNYKTTPPVLDSDGSFFLYSKLTVDKSRWQQGNVFSCSVMHEALHNHYTQKSLSLSPGK

SEQ ID NO: 1469 - protein, 248 aa, Artificial sequence
  Synthetic peptide
MWGACWPFPWECFKEGGGGGVDKTHTCPPCPAPELLGGPSVFLFPPKPKDTLMISRTPEVTCVVVDVSHEDPEVKFNWYVDGVEVHNAKTKPREEQYNSTYRVVSVLTVLHQDWLNGKEYKCKVSNKALPAPIEKTISKAKGQPREPQVYTLPPSRDELTKNQVSLTCLVKGFYPSDIAVEWESNGQPENNYKTTPPVLDSDGSFFLYSKLTVDKSRWQQGNVFSCSVMHEALHNHYTQKSLSLSPGK

SEQ ID NO: 1470 - protein, 248 aa, Artificial sequence
  Synthetic peptide
MVPFCDLLTKHCFEAGGGGGVDKTHTCPPCPAPELLGGPSVFLFPPKPKDTLMISRTPEVTCVVVDVSHEDPEVKFNWYVDGVEVHNAKTKPREEQYNSTYRVVSVLTVLHQDWLNGKEYKCKVSNKALPAPIEKTISKAKGQPREPQVYTLPPSRDELTKNQVSLTCLVKGFYPSDIAVEWESNGQPENNYKTTPPVLDSDGSFFLYSKLTVDKSRWQQGNVFSCSVMHEALHNHYTQKSLSLSPGK

SEQ ID NO: 1471 - protein, 252 aa, Artificial sequence
  Synthetic peptide
MGSRCKYKWDVLTKQCFHHGGGGGVDKTHTCPPCPAPELLGGPSVFLFPPKPKDTLMISRTPEVTCVVVDVSHEDPEVKFNWYVDGVEVHNAKTKPREEQYNSTYRVVSVLTVLHQDWLNGKEYKCKVSNKALPAPIEKTISKAKGQPREPQVYTLPPSRDELTKNQVSLTCLVKGFYPSDIAVEWESNGQPENNYKTTPPVLDSDGSFFLYSKLTVDKSRWQQGNVFSCSVMHEALHNHYTQKSLSLSPGK

SEQ ID NO: 1472 - protein, 252 aa, Artificial sequence
  Synthetic peptide
MLPGCKWDLLIKQWVCDPLGGGGGVDKTHTCPPCPAPELLGGPSVFLFPPKPKDTLMISRTPEVTCVVVDVSHEDPEVKFNWYVDGVEVHNAKTKPREEQYNSTYRVVSVLTVLHQDWLNGKEYKCKVSNKALPAPIEKTISKAKGQPREPQVYTLPPSRDELTKNQVSLTCLVKGFYPSDIAVEWESNGQPENNYKTTPPVLDSDGSFFLYSKLTVDKSRWQQGNVFSCSVMHEALHNHYTQKSLSLSPGK

SEQ ID NO: 1473 - protein, 252 aa, Artificial sequence
  Synthetic peptide
MSADCYFDILTKSDVCTSSGGGGGVDKTHTCPPCPAPELLGGPSVFLFPPKPKDTLMISRTPEVTCVVVDVSHEDPEVKFNWYVDGVEVHNAKTKPREEQYNSTYRVVSVLTVLHQDWLNGKEYKCKVSNKALPAPIEKTISKAKGQPREPQVYTLPPSRDELTKNQVSLTCLVKGFYPSDIAVEWESNGQPENNYKTTPPVLDSDGSFFLYSKLTVDKSRWQQGNVFSCSVMHEALHNHYTQKSLSLSPGK

SEQ ID NO: 1474 - protein, 252 aa, Artificial sequence
  Synthetic peptide
MSDDCMYDQLTRMFICSNLGGGGGVDKTHTCPPCPAPELLGGPSVFLFPPKPKDTLMISRTPEVTCVVVDVSHEDPEVKFNWYVDGVEVHNAKTKPREEQYNSTYRVVSVLTVLHQDWLNGKEYKCKVSNKALPAPIEKTISKAKGQPREPQVYTLPPSRDELTKNQVSLTCLVKGFYPSDIAVEWESNGQPENNYKTTPPVLDSDGSFFLYSKLTVDKSRWQQGNVFSCSVMHEALHNHYTQKSLSLSPGK

SEQ ID NO: 1475 - protein, 252 aa, Artificial sequence
  Synthetic peptide
MDLNCKYDELTYKEWCQFNGGGGGVDKTHTCPPCPAPELLGGPSVFLFPPKPKDTLMISRTPEVTCVVVDVSHEDPEVKFNWYVDGVEVHNAKTKPREEQYNSTYRVVSVLTVLHQDWLNGKEYKCKVSNKALPAPIEKTISKAKGQPREPQVYTLPPSRDELTKNQVSLTCLVKGFYPSDIAVEWESNGQPENNYKTTPPVLDSDGSFFLYSKLTVDKSRWQQGNVFSCSVMHEALHNHYTQKSLSLSPGK

SEQ ID NO: 1476 - protein, 252 aa, Artificial sequence
  Synthetic peptide
MFHDCKYDLLTRQMVCHGLGGGGGVDKTHTCPPCPAPELLGGPSVFLFPPKPKDTLMISRTPEVTCVVVDVSHEDPEVKFNWYVDGVEVHNAKTKPREEQYNSTYRVVSVLTVLHQDWLNGKEYKCKVSNKALPAPIEKTISKAKGQPREPQVYTLPPSRDELTKNQVSLTCLVKGFYPSDIAVEWESNGQPENNYKTTPPVLDSDGSFFLYSKLTVDKSRWQQGNVFSCSVMHEALHNHYTQKSLSLSPGK

SEQ ID NO: 1477 - protein, 252 aa, Artificial sequence
  Synthetic peptide
MRNHCFWDHLLKQDICPSPGGGGGVDKTHTCPPCPAPELLGGPSVFLFPPKPKDTLMISRTPEVTCVVVDVSHEDPEVKFNWYVDGVEVHNAKTKPREEQYNSTYRVVSVLTVLHQDWLNGKEYKCKVSNKALPAPIEKTISKAKGQPREPQVYTLPPSRDELTKNQVSLTCLVKGFYPSDIAVEWESNGQPENNYKTTPPVLDSDGSFFLYSKLTVDKSRWQQGNVFSCSVMHEALHNHYTQKSLSLSPGK

SEQ ID NO: 1478 - protein, 252 aa, Artificial sequence
  Synthetic peptide
MANQCWWDSLTKKNVCEFFGGGGGVDKTHTCPPCPAPELLGGPSVFLFPPKPKDTLMISRTPEVTCVVVDVSHEDPEVKFNWYVDGVEVHNAKTKPREEQYNSTYRVVSVLTVLHQDWLNGKEYKCKVSNKALPAPIEKTISKAKGQPREPQVYTLPPSRDELTKNQVSLTCLVKGFYPSDIAVEWESNGQPENNYKTTPPVLDSDGSFFLYSKLTVDKSRWQQGNVFSCSVMHEALHNHYTQKSLSLSPGK

SEQ ID NO: 1479 - protein, 252 aa, Artificial sequence
  Synthetic peptide
MFHDCKWDLLTKQWVCHGLGGGGGVDKTHTCPPCPAPELLGGPSVFLFPPKPKDTLMISRTPEVTCVVVDVSHEDPEVKFNWYVDGVEVHNAKTKPREEQYNSTYRVVSVLTVLHQDWLNGKEYKCKVSNKALPAPIEKTISKAKGQPREPQVYTLPPSRDELTKNQVSLTCLVKGFYPSDIAVEWESNGQPENNYKTTPPVLDSDGSFFLYSKLTVDKSRWQQGNVFSCSVMHEALHNHYTQKSLSLSPGK

SEQ ID NO: 1480 - protein, 293 aa, Artificial sequence
  Synthetic peptide
MLPGCKWDLLIKQWVCDPLGSGSATGGSGSTASSGSGSATHMLPGCKWDLLIKQWVCDPLGGGGGVDKTHTCPPCPAPELLGGPSVFLFPPKPKDTLMISRTPEVTCVVVDVSHEDPEVKFNWYVDGVEVHNAKTKPREEQYNSTYRVVSVLTVLHQDWLNGKEYKCKVSNKALPAPIEKTISKAKGQPREPQVYTLPPSRDELTKNQVSLTCLVKGFYPSDIAVEWESNGQPENNYKTTPPVLDSDGSFFLYSKLTVDKSRWQQGNVFSCSVMHEALHNHYTQKSLSLSPGK

SEQ ID NO: 1481 - protein, 293 aa, Artificial sequence
  Synthetic peptide
MFHDCKWDLLTKQWVCHGLGSGSATGGSGSTASSGSGSATHMFHDCKWDLLTKQWVCHGLGGGGGVDKTHTCPPCPAPELLGGPSVFLFPPKPKDTLMISRTPEVTCVVVDVSHEDPEVKFNWYVDGVEVHNAKTKPREEQYNSTYRVVSVLTVLHQDWLNGKEYKCKVSNKALPAPIEKTISKAKGQPREPQVYTLPPSRDELTKNQVSLTCLVKGFYPSDIAVEWESNGQPENNYKTTPPVLDSDGSFFLYSKLTVDKSRWQQGNVFSCSVMHEALHNHYTQKSLSLSPGK

SEQ ID NO: 1482 - protein, 20 aa, Artificial sequence
  Synthetic peptide
PIRQEECDWDPWTCEHMWEV

SEQ ID NO: 1483 - protein, 20 aa, Artificial sequence
  Synthetic peptide
TNIQEECEWDPWTCDHMPGK

SEQ ID NO: 1484 - protein, 20 aa, Artificial sequence
  Synthetic peptide
WYEQDACEWDPWTCEHMAEV

SEQ ID NO: 1485 - protein, 20 aa, Artificial sequence
  Synthetic peptide
NRLQEVCEWDPWTCEHMENV

SEQ ID NO: 1486 - protein, 20 aa, Artificial sequence
  Synthetic peptide
AATQEECEWDPWTCEHMPRS

SEQ ID NO: 1487 - protein, 20 aa, Artificial sequence
  Synthetic peptide
LRHQEGCEWDPWTCEHMFDW

SEQ ID NO: 1488 - protein, 20 aa, Artificial sequence
  Synthetic peptide
VPRQKDCEWDPWTCEHMYVG

SEQ ID NO: 1489 - protein, 20 aa, Artificial sequence
  Synthetic peptide
SISHEECEWDPWTCEHMQVG

SEQ ID NO: 1490 - protein, 20 aa, Artificial sequence
  Synthetic peptide
WAAQEECEWDPWTCEHMGRM

SEQ ID NO: 1491 - protein, 20 aa, Artificial sequence
  Synthetic peptide
TWPQDKCEWDPWTCEHMGST

SEQ ID NO: 1492 - protein, 20 aa, Artificial sequence
  Synthetic peptide
GHSQEECGWDPWTCEHMGTS

SEQ ID NO: 1493 - protein, 20 aa, Artificial sequence
  Synthetic peptide
QHWQEECEWDPWTCDHMPSK

SEQ ID NO: 1494 - protein, 20 aa, Artificial sequence
  Synthetic peptide
NVRQEKCEWDPWTCEHMPVR

SEQ ID NO: 1495 - protein, 20 aa, Artificial sequence
  Synthetic peptide
KSGQVECNWDPWTCEHMPRN

SEQ ID NO: 1496 - protein, 20 aa, Artificial sequence
  Synthetic peptide
VKTQEHCDWDPWTCEHMREW

SEQ ID NO: 1497 - protein, 20 aa, Artificial sequence
  Synthetic peptide
AWGQEGCDWDPWTCEHMLPM

SEQ ID NO: 1498 - protein, 20 aa, Artificial sequence
  Synthetic peptide
PVNQEDCEWDPWTCEHMPPM

SEQ ID NO: 1499 - protein, 20 aa, Artificial sequence
  Synthetic peptide
RAPQEDCEWDPWTCAHMDIK

SEQ ID NO: 1500 - protein, 20 aa, Artificial sequence
  Synthetic peptide
HGQNMECEWDPWTCEHMFRY

SEQ ID NO: 1501 - protein, 20 aa, Artificial sequence
  Synthetic peptide
PRLQEECVWDPWTCEHMPLR

SEQ ID NO: 1502 - protein, 20 aa, Artificial sequence
  Synthetic peptide
RTTQEKCEWDPWTCEHMESQ

SEQ ID NO: 1503 - protein, 20 aa, Artificial sequence
  Synthetic peptide
QTSQEDCVWDPWTCDHMVSS

SEQ ID NO: 1504 - protein, 20 aa, Artificial sequence
  Synthetic peptide
QVIGRPCEWDPWTCEHLEGL

SEQ ID NO: 1505 - protein, 20 aa, Artificial sequence
  Synthetic peptide
WAQQEECAWDPWTCDHMVGL

SEQ ID NO: 1506 - protein, 20 aa, Artificial sequence
  Synthetic peptide
LPGQEDCEWDPWTCEHMVRS

SEQ ID NO: 1507 - protein, 20 aa, Artificial sequence
  Synthetic peptide
PMNQVECDWDPWTCEHMPRS

SEQ ID NO: 1508 - protein, 20 aa, Artificial sequence
  Synthetic peptide
FGWSHGCEWDPWTCEHMGST

SEQ ID NO: 1509 - protein, 20 aa, Artificial sequence
  Synthetic peptide
KSTQDDCDWDPWTCEHMVGP

SEQ ID NO: 1510 - protein, 20 aa, Artificial sequence
  Synthetic peptide
GPRISTCQWDPWTCEHMDQL

SEQ ID NO: 1511 - protein, 20 aa, Artificial sequence
  Synthetic peptide
STIGDMCEWDPWTCAHMQVD

SEQ ID NO: 1512 - protein, 20 aa, Artificial sequence
  Synthetic peptide
VLGGQGCEWDPWTCRLLQGW

SEQ ID NO: 1513 - protein, 20 aa, Artificial sequence
  Synthetic peptide
VLGGQGCQWDPWTCSHLEDG

SEQ ID NO: 1514 - protein, 20 aa, Artificial sequence
  Synthetic peptide
TTIGSMCEWDPWTCAHMQGG

SEQ ID NO: 1515 - protein, 20 aa, Artificial sequence
  Synthetic peptide
TKGKSVCQWDPWTCSHMQSG

SEQ ID NO: 1516 - protein, 20 aa, Artificial sequence
  Synthetic peptide
TTIGSMCQWDPWTCAHMQGG

SEQ ID NO: 1517 - protein, 20 aa, Artificial sequence
  Synthetic peptide
WVNEVVCEWDPWTCNHWDTP

SEQ ID NO: 1518 - protein, 20 aa, Artificial sequence
  Synthetic peptide
VVQVGMCQWDPWTCKHMRLQ

SEQ ID NO: 1519 - protein, 20 aa, Artificial sequence
  Synthetic peptide
AVGSQTCEWDPWTCAHLVEV

SEQ ID NO: 1520 - protein, 20 aa, Artificial sequence
  Synthetic peptide
QGMKMFCEWDPWTCAHIVYR

SEQ ID NO: 1521 - protein, 20 aa, Artificial sequence
  Synthetic peptide
TTIGSMCQWDPWTCEHMQGG

SEQ ID NO: 1522 - protein, 20 aa, Artificial sequence
  Synthetic peptide
TSQRVGCEWDPWTCQHLTYT

SEQ ID NO: 1523 - protein, 20 aa, Artificial sequence
  Synthetic peptide
QWSWPPCEWDPWTCQTVWPS

SEQ ID NO: 1524 - protein, 20 aa, Artificial sequence
  Synthetic peptide
GTSPSFCQWDPWTCSHMVQG

SEQ ID NO: 1525 - protein, 14 aa, Artificial sequence
  Synthetic peptide
QEECEWDPWTCEHM

SEQ ID NO: 1526 - protein, 22 aa, Artificial sequence
  Synthetic peptide
QNYKPLDELDATLYEHFIFHYT

SEQ ID NO: 1527 - protein, 22 aa, Artificial sequence
  Synthetic peptide
LNFTPLDELEQTLYEQWTLQQS

SEQ ID NO: 1528 - protein, 22 aa, Artificial sequence
  Synthetic peptide
TKFNPLDELEQTLYEQWTLQHQ

SEQ ID NO: 1529 - protein, 22 aa, Artificial sequence
  Synthetic peptide
VKFKPLDALEQTLYEHWMFQQA

SEQ ID NO: 1530 - protein, 22 aa, Artificial sequence
  Synthetic peptide
VKYKPLDELDEILYEQQTFQER

SEQ ID NO: 1531 - protein, 22 aa, Artificial sequence
  Synthetic peptide
TNFMPMDDLEQRLYEQFILQQG

SEQ ID NO: 1532 - protein, 22 aa, Artificial sequence
  Synthetic peptide
SKFKPLDELEQTLYEQWTLQHA

SEQ ID NO: 1533 - protein, 22 aa, Artificial sequence
  Synthetic peptide
QKFQPLDELEQTLYEQFMLQQA

SEQ ID NO: 1534 - protein, 22 aa, Artificial sequence
  Synthetic peptide
QNFKPMDELEDTLYKQFLFQHS

SEQ ID NO: 1535 - protein, 22 aa, Artificial sequence
  Synthetic peptide
YKFTPLDDLEQTLYEQWTLQHV

SEQ ID NO: 1536 - protein, 22 aa, Artificial sequence
  Synthetic peptide
QEYEPLDELDETLYNQWMFHQR

SEQ ID NO: 1537 - protein, 22 aa, Artificial sequence
  Synthetic peptide
SNFMPLDELEQTLYEQFMLQHQ

SEQ ID NO: 1538 - protein, 22 aa, Artificial sequence
  Synthetic peptide
QKYQPLDELDKTLYDQFMLQQG

SEQ ID NO: 1539 - protein, 22 aa, Artificial sequence
  Synthetic peptide
QKFQPLDELEETLYKQWTLQQR

SEQ ID NO: 1540 - protein, 22 aa, Artificial sequence
  Synthetic peptide
VKYKPLDELDEWLYHQFTLHHQ

SEQ ID NO: 1541 - protein, 22 aa, Artificial sequence
  Synthetic peptide
QKFMPLDELDEILYEQFMFQQS

SEQ ID NO: 1542 - protein, 22 aa, Artificial sequence
  Synthetic peptide
QTFQPLDDLEEYLYEQWIRRYH

SEQ ID NO: 1543 - protein, 22 aa, Artificial sequence
  Synthetic peptide
EDYMPLDALDAQLYEQFILLHG

SEQ ID NO: 1544 - protein, 22 aa, Artificial sequence
  Synthetic peptide
HTFQPLDELEETLYYQWLYDQL

SEQ ID NO: 1545 - protein, 22 aa, Artificial sequence
  Synthetic peptide
YKFNPMDELEQTLYEEFLFQHA

SEQ ID NO: 1546 - protein, 22 aa, Artificial sequence
  Synthetic peptide
TNYKPLDELDATLYEHWILQHS

SEQ ID NO: 1547 - protein, 22 aa, Artificial sequence
  Synthetic peptide
QKFKPLDELEQTLYEQWTLQQR

SEQ ID NO: 1548 - protein, 22 aa, Artificial sequence
  Synthetic peptide
TKFQPLDELDQTLYEQWTLQQR

SEQ ID NO: 1549 - protein, 22 aa, Artificial sequence
  Synthetic peptide
TNFQPLDELDQTLYEQWTLQQR

SEQ ID NO: 1550 - protein, 20 aa, Artificial sequence
  Synthetic peptide
KFNPLDELEETLYEQFTFQQ

SEQ ID NO: 1551 - protein, 20 aa, Artificial sequence
  Synthetic peptide
AGGMRPYDGMLGWPNYDVQA

SEQ ID NO: 1552 - protein, 20 aa, Artificial sequence
  Synthetic peptide
QTWDDPCMHILGPVTWRRCI

SEQ ID NO: 1553 - protein, 20 aa, Artificial sequence
  Synthetic peptide
APGQRPYDGMLGWPTYQRIV

SEQ ID NO: 1554 - protein, 20 aa, Artificial sequence
  Synthetic peptide
SGQLRPCEEIFGCGTQNLAL

SEQ ID NO: 1555 - protein, 20 aa, Artificial sequence
  Synthetic peptide
FGDKRPLECMFGGPIQLCPR

SEQ ID NO: 1556 - protein, 20 aa, Artificial sequence
  Synthetic peptide
GQDLRPCEDMFGCGTKDWYG

SEQ ID NO: 1557 - protein, 14 aa, Artificial sequence
  Synthetic peptide
KRPCEEIFGGCTYQ

SEQ ID NO: 1558 - protein, 20 aa, Artificial sequence
  Synthetic peptide
GFEYCDGMEDPFTFGCDKQT

SEQ ID NO: 1559 - protein, 20 aa, Artificial sequence
  Synthetic peptide
KLEYCDGMEDPFTQGCDNQS

SEQ ID NO: 1560 - protein, 20 aa, Artificial sequence
  Synthetic peptide
LQEWCEGVEDPFTFGCEKQR

SEQ ID NO: 1561 - protein, 20 aa, Artificial sequence
  Synthetic peptide
AQDYCEGMEDPFTFGCEMQK

SEQ ID NO: 1562 - protein, 20 aa, Artificial sequence
  Synthetic peptide
LLDYCEGVQDPFTFGCENLD

SEQ ID NO: 1563 - protein, 20 aa, Artificial sequence
  Synthetic peptide
HQEYCEGMEDPFTFGCEYQG

SEQ ID NO: 1564 - protein, 20 aa, Artificial sequence
  Synthetic peptide
MLDYCEGMDDPFTFGCDKQM

SEQ ID NO: 1565 - protein, 20 aa, Artificial sequence
  Synthetic peptide
LQDYCEGVEDPFTFGCENQR

SEQ ID NO: 1566 - protein, 20 aa, Artificial sequence
  Synthetic peptide
LQDYCEGVEDPFTFGCEKQR

SEQ ID NO: 1567 - protein, 18 aa, Artificial sequence
  Synthetic peptide
FDYCEGVEDPFTFGCDNH

SEQ ID NO: 1568 - protein, 14 aa, Artificial sequence
  Synthetic peptide
KRPCEEMWGGCNYD

SEQ ID NO: 1569 - protein, 14 aa, Artificial sequence
  Synthetic peptide
HQICKWDPWTCKHW

SEQ ID NO: 1570 - protein, 14 aa, Artificial sequence
  Synthetic peptide
KRPCEEIFGGCTYQ

SEQ ID NO: 1571 - protein, 14 aa, Artificial sequence
  Synthetic peptide
QEECEWDPWTCEHM

SEQ ID NO: 1572 - protein, 18 aa, Artificial sequence
  Synthetic peptide
FDYCEGVEDPFTFGCDNH

SEQ ID NO: 1573 - protein, 20 aa, Artificial sequence
  Synthetic peptide
KFNPLDELEETLYEQFTFQQ

SEQ ID NO: 1574 - protein, 14 aa, Artificial sequence
  Synthetic peptide
QYGCDGFLYGCMIN

SEQ ID NO: 1575 - protein, 31 aa, Artificial sequence
  Synthetic peptide
MGAQKFNPLDELEETLYEQFTFQQLEGGGGG

SEQ ID NO: 1576 - protein, 28 aa, Artificial sequence
  Synthetic peptide
MKFNPLDELEETLYEQFTFQQLEGGGGG

SEQ ID NO: 1577 - protein, 50 aa, Artificial sequence
  Synthetic peptide
MKFNPLDELEETLYEQFTFQQGSGSATGGSGSTASSGSGSATHLEGGGGG

SEQ ID NO: 1578 - protein, 59 aa, Artificial sequence
  Synthetic peptide
MGAQKFNPLDELEETLYEQFTFQQGGGGGGGGKFNPLDELEETLYEQFTFQQLEGGGGG

SEQ ID NO: 1579 - protein, 55 aa, Artificial sequence
  Synthetic peptide
MKFNPLDELEETLYEQFTFQQGGGGGGGKFNPLDELEETLYEQFTFQQLEGGGGG

SEQ ID NO: 1580 - protein, 25 aa, Artificial sequence
  Synthetic peptide
MGAQQEECEWDPWTCEHMLEGGGGG

SEQ ID NO: 1581 - protein, 44 aa, Artificial sequence
  Synthetic peptide
MQEECEWDPWTCEHMGSGSATGGSGSTASSGSGSATHLEGGGGG

SEQ ID NO: 1582 - protein, 61 aa, Artificial sequence
  Synthetic peptide
MGAQQEECEWDPWTCEHMGSGSATGGSGSTASSGSGSATHQEECEWDPWTCEHMLEGGGGG

SEQ ID NO: 1583 - protein, 29 aa, Artificial sequence
  Synthetic peptide
GGGGGAQKFNPLDELEETLYEQFTFQQLE

SEQ ID NO: 1584 - protein, 51 aa, Artificial sequence
  Synthetic peptide
GGGGGAQGSGSATGGSGSTASSGSGSATHKFNPLDELEETLYEQFTFQQLE

SEQ ID NO: 1585 - protein, 57 aa, Artificial sequence
  Synthetic peptide
GGGGGAQKFNPLDELEETLYEQFTFQQGGGGGGGGKFNPLDELEETLYEQFTFQQLE

SEQ ID NO: 1586 - protein, 23 aa, Artificial sequence
  Synthetic peptide
GGGGGAQQEECEWDPWTCEHMLE

SEQ ID NO: 1587 - protein, 45 aa, Artificial sequence
  Synthetic peptide
GGGGGAQGSGSATGGSGSTASSGSGSATHQEECEWDPWTCEHMLE

SEQ ID NO: 1588 - protein, 59 aa, Artificial sequence
  Synthetic peptide
GGGGGAQQEECEWDPWTCEHMGSGSATGGSGSTASSGSGSATHQEECEWDPWTCEHMLE

SEQ ID NO: 1589 - protein, 74 aa, Artificial sequence
  Synthetic peptide
MGAQEECEWDPWTCEHMGGGGGGGGKFNPLDELEETLYEQFTFQQGSGSATGGSGSTASSGSGSATHLEGGGGG

SEQ ID NO: 1590 - protein, 70 aa, Artificial sequence
  Synthetic peptide
GGGGGAQGSGSATGGSGSTASSGSGSATHKFNPLDELEETLYEQFTFQQGGGGGQEECEWDPWTCEHMLE

SEQ ID NO: 1591 - protein, 29 aa, Artificial sequence
  Synthetic peptide
MGAQFDYCEGVEDPFTFGCDNHLEGGGGG

SEQ ID NO: 1592 - protein, 25 aa, Artificial sequence
  Synthetic peptide
MGAQQYGCDGFLYGCMINLEGGGGG

SEQ ID NO: 1593 - protein, 25 aa, Artificial sequence
  Synthetic peptide
MGAQKRPCEEMWGGCNYDLEGGGGG

SEQ ID NO: 1594 - protein, 25 aa, Artificial sequence
  Synthetic peptide
MGAQHQICKWDPWTCKHWLEGGGGG

SEQ ID NO: 1595 - protein, 25 aa, Artificial sequence
  Synthetic peptide
MGAQKRPCEEIFGGCTYQLEGGGGG

SEQ ID NO: 1596 - protein, 29 aa, Artificial sequence
  Synthetic peptide
GGGGGAQPIRQEECDWDPWTCEHMWEVLE

SEQ ID NO: 1597 - protein, 29 aa, Artificial sequence
  Synthetic peptide
GGGGGAQTNIQEECEWDPWTCDHMPGKLE

SEQ ID NO: 1598 - protein, 29 aa, Artificial sequence
  Synthetic peptide
GGGGGAQWYEQDACEWDPWTCEHMAEVLE

SEQ ID NO: 1599 - protein, 29 aa, Artificial sequence
  Synthetic peptide
GGGGGAQNRLQEVCEWDPWTCEHMENVLE

SEQ ID NO: 1600 - protein, 29 aa, Artificial sequence
  Synthetic peptide
GGGGGAQAATQEECEWDPWTCEHMPRSLE

SEQ ID NO: 1601 - protein, 29 aa, Artificial sequence
  Synthetic peptide
GGGGGAQLRHQEGCEWDPWTCEHMFDWLE

SEQ ID NO: 1602 - protein, 29 aa, Artificial sequence
  Synthetic peptide
GGGGGAQVPRQKDCEWDPWTCEHMYVGLE

SEQ ID NO: 1603 - protein, 29 aa, Artificial sequence
  Synthetic peptide
GGGGGAQSISHEECEWDPWTCEHMQVGLE

SEQ ID NO: 1604 - protein, 29 aa, Artificial sequence
  Synthetic peptide
GGGGGAQWAAQEECEWDPWTCEHMGRMLE

SEQ ID NO: 1605 - protein, 29 aa, Artificial sequence
  Synthetic peptide
GGGGGAQTWPQDKCEWDPWTCEHMGSTLE

SEQ ID NO: 1606 - protein, 29 aa, Artificial sequence
  Synthetic peptide
GGGGGAQGHSQEECGWDPWTCEHMGTSLE

SEQ ID NO: 1607 - protein, 29 aa, Artificial sequence
  Synthetic peptide
GGGGGAQQHWQEECEWDPWTCDHMPSKLE

SEQ ID NO: 1608 - protein, 29 aa, Artificial sequence
  Synthetic peptide
GGGGGAQNVRQEKCEWDPWTCEHMPVRLE

SEQ ID NO: 1609 - protein, 29 aa, Artificial sequence
  Synthetic peptide
GGGGGAQKSGQVECNWDPWTCEHMPRNLE

SEQ ID NO: 1610 - protein, 29 aa, Artificial sequence
  Synthetic peptide
GGGGGAQVKTQEHCDWDPWTCEHMREWLE

SEQ ID NO: 1611 - protein, 29 aa, Artificial sequence
  Synthetic peptide
GGGGGAQAWGQEGCDWDPWTCEHMLPMLE

SEQ ID NO: 1612 - protein, 29 aa, Artificial sequence
  Synthetic peptide
GGGGGAQPVNQEDCEWDPWTCEHMPPMLE

SEQ ID NO: 1613 - protein, 29 aa, Artificial sequence
  Synthetic peptide
GGGGGAQRAPQEDCEWDPWTCAHMDIKLE

SEQ ID NO: 1614 - protein, 29 aa, Artificial sequence
  Synthetic peptide
GGGGGAQHGQNMECEWDPWTCEHMFRYLE

SEQ ID NO: 1615 - protein, 29 aa, Artificial sequence
  Synthetic peptide
GGGGGAQPRLQEECVWDPWTCEHMPLRLE

SEQ ID NO: 1616 - protein, 29 aa, Artificial sequence
  Synthetic peptide
GGGGGAQRTTQEKCEWDPWTCEHMESQLE

SEQ ID NO: 1617 - protein, 29 aa, Artificial sequence
  Synthetic peptide
GGGGGAQQTSQEDCVWDPWTCDHMVSSLE

SEQ ID NO: 1618 - protein, 29 aa, Artificial sequence
  Synthetic peptide
GGGGGAQQVIGRPCEWDPWTCEHLEGLLE

SEQ ID NO: 1619 - protein, 29 aa, Artificial sequence
  Synthetic peptide
GGGGGAQWAQQEECAWDPWTCDHMVGLLE

SEQ ID NO: 1620 - protein, 29 aa, Artificial sequence
  Synthetic peptide
GGGGGAQLPGQEDCEWDPWTCEHMVRSLE

SEQ ID NO: 1621 - protein, 29 aa, Artificial sequence
  Synthetic peptide
GGGGGAQPMNQVECDWDPWTCEHMPRSLE

SEQ ID NO: 1622 - protein, 29 aa, Artificial sequence
  Synthetic peptide
GGGGGAQFGWSHGCEWDPWTCEHMGSTLE

SEQ ID NO: 1623 - protein, 29 aa, Artificial sequence
  Synthetic peptide
GGGGGAQKSTQDDCDWDPWTCEHMVGPLE

SEQ ID NO: 1624 - protein, 29 aa, Artificial sequence
  Synthetic peptide
GGGGGAQGPRISTCQWDPWTCEHMDQLLE

SEQ ID NO: 1625 - protein, 29 aa, Artificial sequence
  Synthetic peptide
GGGGGAQSTIGDMCEWDPWTCAHMQVDLE

SEQ ID NO: 1626 - protein, 29 aa, Artificial sequence
  Synthetic peptide
GGGGGAQVLGGQGCEWDPWTCRLLQGWLE

SEQ ID NO: 1627 - protein, 29 aa, Artificial sequence
  Synthetic peptide
GGGGGAQVLGGQGCQWDPWTCSHLEDGLE

SEQ ID NO: 1628 - protein, 29 aa, Artificial sequence
  Synthetic peptide
GGGGGAQTTIGSMCEWDPWTCAHMQGGLE

SEQ ID NO: 1629 - protein, 29 aa, Artificial sequence
  Synthetic peptide
GGGGGAQTKGKSVCQWDPWTCSHMQSGLE

SEQ ID NO: 1630 - protein, 29 aa, Artificial sequence
  Synthetic peptide
GGGGGAQTTIGSMCQWDPWTCAHMQGGLE

SEQ ID NO: 1631 - protein, 29 aa, Artificial sequence
  Synthetic peptide
GGGGGAQWVNEVVCEWDPWTCNHWDTPLE

SEQ ID NO: 1632 - protein, 29 aa, Artificial sequence
  Synthetic peptide
GGGGGAQVVQVGMCQWDPWTCKHMRLQLE

SEQ ID NO: 1633 - protein, 29 aa, Artificial sequence
  Synthetic peptide
GGGGGAQAVGSQTCEWDPWTCAHLVEVLE

SEQ ID NO: 1634 - protein, 29 aa, Artificial sequence
  Synthetic peptide
GGGGGAQQGMKMFCEWDPWTCAHIVYRLE

SEQ ID NO: 1635 - protein, 29 aa, Artificial sequence
  Synthetic peptide
GGGGGAQTTIGSMCQWDPWTCEHMQGGLE

SEQ ID NO: 1636 - protein, 29 aa, Artificial sequence
  Synthetic peptide
GGGGGAQTSQRVGCEWDPWTCQHLTYTLE

SEQ ID NO: 1637 - protein, 29 aa, Artificial sequence
  Synthetic peptide
GGGGGAQQWSWPPCEWDPWTCQTVWPSLE

SEQ ID NO: 1638 - protein, 29 aa, Artificial sequence
  Synthetic peptide
GGGGGAQGTSPSFCQWDPWTCSHMVQGLE

SEQ ID NO: 1639 - protein, 29 aa, Artificial sequence
  Synthetic peptide
GGGGGAQTQGLHQCEWDPWTCKVLWPSLE

SEQ ID NO: 1640 - protein, 29 aa, Artificial sequence
  Synthetic peptide
GGGGGAQVWRSQVCQWDPWTCNLGGDWLE

SEQ ID NO: 1641 - protein, 29 aa, Artificial sequence
  Synthetic peptide
GGGGGAQDKILEECQWDPWTCQFFYGALE

SEQ ID NO: 1642 - protein, 29 aa, Artificial sequence
  Synthetic peptide
GGGGGAQATFARQCQWDPWTCALGGNWLE

SEQ ID NO: 1643 - protein, 29 aa, Artificial sequence
  Synthetic peptide
GGGGGAQGPAQEECEWDPWTCEPLPLMLE

SEQ ID NO: 1644 - protein, 29 aa, Artificial sequence
  Synthetic peptide
GGGGGAQRPEDMCSQWDPWTWHLQGYCLE

SEQ ID NO: 1645 - protein, 29 aa, Artificial sequence
  Synthetic peptide
GGGGGAQLWQLAVCQWDPQTCDHMGALLE

SEQ ID NO: 1646 - protein, 29 aa, Artificial sequence
  Synthetic peptide
GGGGGAQTQLVSLCEWDPWTCRLLDGWLE

SEQ ID NO: 1647 - protein, 29 aa, Artificial sequence
  Synthetic peptide
GGGGGAQMGGAGRCEWDPWTCQLLQGWLE

SEQ ID NO: 1648 - protein, 29 aa, Artificial sequence
  Synthetic peptide
GGGGGAQMFLPNECQWDPWTCSNLPEALE

SEQ ID NO: 1649 - protein, 29 aa, Artificial sequence
  Synthetic peptide
GGGGGAQFGWSHGCEWDPWTCRLLQGWLE

SEQ ID NO: 1650 - protein, 29 aa, Artificial sequence
  Synthetic peptide
GGGGGAQWPQTEGCQWDPWTCRLLHGWLE

SEQ ID NO: 1651 - protein, 29 aa, Artificial sequence
  Synthetic peptide
GGGGGAQPDTRQGCQWDPWTCRLYGMWLE

SEQ ID NO: 1652 - protein, 29 aa, Artificial sequence
  Synthetic peptide
GGGGGAQTWPQDKCEWDPWTCRLLQGWLE

SEQ ID NO: 1653 - protein, 29 aa, Artificial sequence
  Synthetic peptide
GGGGGAQDKILEECEWDPWTCRLLQGWLE

SEQ ID NO: 1654 - protein, 29 aa, Artificial sequence
  Synthetic peptide
GGGGGAQAATQEECEWDPWTCRLLQGWLE

SEQ ID NO: 1655 - protein, 33 aa, Artificial sequence
  Synthetic peptide
MGAQTNFMPMDDLEQRLYEQFILQQGLEGGGGG

SEQ ID NO: 1656 - protein, 33 aa, Artificial sequence
  Synthetic peptide
MGAQTNYKPLDELDATLYEHWILQHSLEGGGGG

SEQ ID NO: 1657 - protein, 33 aa, Artificial sequence
  Synthetic peptide
MGAQQKYQPLDELDKTLYDQFMLQQGLEGGGGG

SEQ ID NO: 1658 - protein, 33 aa, Artificial sequence
  Synthetic peptide
MGAQLNFTPLDELEQTLYEQWTLQQSLEGGGGG

SEQ ID NO: 1659 - protein, 33 aa, Artificial sequence
  Synthetic peptide
MGAQQKFQPLDELEQTLYEQFMLQQALEGGGGG

SEQ ID NO: 1660 - protein, 33 aa, Artificial sequence
  Synthetic peptide
MGAQQEYEPLDELDETLYNQWMFHQRLEGGGGG

SEQ ID NO: 1661 - protein, 33 aa, Artificial sequence
  Synthetic peptide
MGAQVKYKPLDELDEILYEQQTFQERLEGGGGG

SEQ ID NO: 1662 - protein, 33 aa, Artificial sequence
  Synthetic peptide
MGAQTKFQPLDELDQTLYEQWTLQQRLEGGGGG

SEQ ID NO: 1663 - protein, 33 aa, Artificial sequence
  Synthetic peptide
MGAQTNFQPLDELDQTLYEQWTLQQRLEGGGGG

SEQ ID NO: 1664 - protein, 33 aa, Artificial sequence
  Synthetic peptide
MGAQQNFKPMDELEDTLYKQFLFQHSLEGGGGG

SEQ ID NO: 1665 - protein, 33 aa, Artificial sequence
  Synthetic peptide
MGAQVKYKPLDELDEWLYHQFTLHHQLEGGGGG

SEQ ID NO: 1666 - protein, 33 aa, Artificial sequence
  Synthetic peptide
MGAQYKFTPLDDLEQTLYEQWTLQHVLEGGGGG

SEQ ID NO: 1667 - protein, 33 aa, Artificial sequence
  Synthetic peptide
MGAQQNYKPLDELDATLYEHFIFHYTLEGGGGG

SEQ ID NO: 1668 - protein, 33 aa, Artificial sequence
  Synthetic peptide
MGAQVKFKPLDALEQTLYEHWMFQQALEGGGGG

SEQ ID NO: 1669 - protein, 33 aa, Artificial sequence
  Synthetic peptide
MGAQEDYMPLDALDAQLYEQFILLHGLEGGGGG

SEQ ID NO: 1670 - protein, 33 aa, Artificial sequence
  Synthetic peptide
MGAQYKFNPMDELEQTLYEEFLFQHALEGGGGG

SEQ ID NO: 1671 - protein, 33 aa, Artificial sequence
  Synthetic peptide
MGAQSNFMPLDELEQTLYEQFMLQHQLEGGGGG

SEQ ID NO: 1672 - protein, 33 aa, Artificial sequence
  Synthetic peptide
MGAQQKFQPLDELEETLYKQWTLQQRLEGGGGG

SEQ ID NO: 1673 - protein, 33 aa, Artificial sequence
  Synthetic peptide
MGAQQKFMPLDELDEILYEQFMFQQSLEGGGGG

SEQ ID NO: 1674 - protein, 33 aa, Artificial sequence
  Synthetic peptide
MGAQTKFNPLDELEQTLYEQWTLQHQLEGGGGG

SEQ ID NO: 1675 - protein, 33 aa, Artificial sequence
  Synthetic peptide
MGAQHTFQPLDELEETLYYQWLYDQLLEGGGGG

SEQ ID NO: 1676 - protein, 33 aa, Artificial sequence
  Synthetic peptide
MGAQQKFKPLDELEQTLYEQWTLQQRLEGGGGG

SEQ ID NO: 1677 - protein, 33 aa, Artificial sequence
  Synthetic peptide
MGAQQTFQPLDDLEEYLYEQWIRRYHLEGGGGG

SEQ ID NO: 1678 - protein, 33 aa, Artificial sequence
  Synthetic peptide
MGAQSKFKPLDELEQTLYEQWTLQHALEGGGGG

SEQ ID NO: 1679 - protein, 29 aa, Artificial sequence
  Synthetic peptide
GGGGGAQSGQLRPCEEIFGCGTQNLALLE

SEQ ID NO: 1680 - protein, 29 aa, Artificial sequence
  Synthetic peptide
GGGGGAQAGGMRPYDGMLGWPNYDVQALE

SEQ ID NO: 1681 - protein, 29 aa, Artificial sequence
  Synthetic peptide
GGGGGAQGQDLRPCEDMFGCGTKDWYGLE

SEQ ID NO: 1682 - protein, 29 aa, Artificial sequence
  Synthetic peptide
GGGGGAQAPGQRPYDGMLGWPTYQRIVLE

SEQ ID NO: 1683 - protein, 29 aa, Artificial sequence
  Synthetic  peptide
GGGGGAQQTWDDPCMHILGPVTWRRCILE

SEQ ID NO: 1684 - protein, 29 aa, Artificial sequence
  Synthetic peptide
GGGGGAQFGDKRPLECMFGGPIQLCPRLE

SEQ ID NO: 1685 - protein, 23 aa, Artificial sequence
  Synthetic peptide
GGGGGAQKRPCEEIFGGCTYQLE

SEQ ID NO: 1686 - protein, 29 aa, Artificial sequence
  Synthetic peptide
GGGGGAQLQEWCEGVEDPFTFGCEKQRLE

SEQ ID NO: 1687 - protein, 29 aa, Artificial sequence
  Synthetic peptide
GGGGGAQMLDYCEGMDDPFTFGCDKQMLE

SEQ ID NO: 1688 - protein, 29 aa, Artificial sequence
  Synthetic peptide
GGGGGAQHQEYCEGMEDPFTFGCEYQGLE

SEQ ID NO: 1689 - protein, 29 aa, Artificial sequence
  Synthetic peptide
GGGGGAQLQDYCEGVEDPFTFGCENQRLE

SEQ ID NO: 1690 - protein, 29 aa, Artificial sequence
  Synthetic peptide
GGGGGAQLLDYCEGVQDPFTFGCENLDLE

SEQ ID NO: 1691 - protein, 29 aa, Artificial sequence
  Synthetic peptide
GGGGGAQGFEYCDGMEDPFTFGCDKQTLE

SEQ ID NO: 1692 - protein, 29 aa, Artificial sequence
  Synthetic peptide
GGGGGAQAQDYCEGMEDPFTFGCEMQKLE

SEQ ID NO: 1693 - protein, 29 aa, Artificial sequence
  Synthetic peptide
GGGGGAQLQDYCEGVEDPFTFGCEKQRLE

SEQ ID NO: 1694 - protein, 29 aa, Artificial sequence
  Synthetic peptide
GGGGGAQKLEYCDGMEDPFTQGCDNQSLE

SEQ ID NO: 1695 - protein, 27 aa, Artificial sequence
  Synthetic peptide
GGGGGAQFDYCEGVEDPFTFGCDNHLE

SEQ ID NO: 1696 - protein, 228 aa, Artificial sequence
  Synthetic peptide
VDKTHTCPPCPAPELLGGPSVFLFPPKPKDTLMISRTPEVTCVVVDVSHEDPEVKFNWYVDGVEVHNAKTKPREEQYNSTYRVVSVLTVLHQDWLNGKEYKCKVSNKALPAPIEKTISKAKGQPREPQVYTLPPSRDELTKNQVSLTCLVKGFYPSDIAVEWESNGQPENNYKTTPPVLDSDGSFFLYSKLTVDKSRWQQGNVFSCSVMHEALHNHYTQKSLSLSPGK

SEQ ID NO: 1697 - protein, 62 aa, Artificial sequence
  Synthetic peptide
GCKWDLLIKQWVCDPLGSGSATGGSGSTASSGSGSATHMLPGCKWDLLIKQWVCDPLGGGGG

SEQ ID NO: 1698 - protein, 290 aa, Artificial sequence
  Synthetic peptide
GCKWDLLIKQWVCDPLGSGSATGGSGSTASSGSGSATHMLPGCKWDLLIKQWVCDPLGGGGGVDKTHTCPPCPAPELLGGPSVFLFPPKPKDTLMISRTPEVTCVVVDVSHEDPEVKFNWYVDGVEVHNAKTKPREEQYNSTYRVVSVLTVLHQDWLNGKEYKCKVSNKALPAPIEKTISKAKGQPREPQVYTLPPSRDELTKNQVSLTCLVKGFYPSDIAVEWESNGQPENNYKTTPPVLDSDGSFFLYSKLTVDKSRWQQGNVFSCSVMHEALHNHYTQKSLSLSPGK

SEQ ID NO: 1699 - protein, 228 aa, Artificial sequence; identical to SEQ ID NO: 1696
  Synthetic peptide

SEQ ID NO: 1700 - protein, 27 aa, Artificial sequence
  Synthetic peptide
GGGGGAQLADHGQCIRWPWMCPPEGWE

SEQ ID NO: 1701 - protein, 255 aa, Artificial sequence
  Synthetic peptide
VDKTHTCPPCPAPELLGGPSVFLFPPKPKDTLMISRTPEVTCVVVDVSHEDPEVKFNWYVDGVEVHNAKTKPREEQYNSTYRVVSVLTVLHQDWLNGKEYKCKVSNKALPAPIEKTISKAKGQPREPQVYTLPPSRDELTKNQVSLTCLVKGFYPSDIAVEWESNGQPENNYKTTPPVLDSDGSFFLYSKLTVDKSRWQQGNVFSCSVMHEALHNHYTQKSLSLSPGKGGGGGAQLADHGQCIRWPWMCPPEGWE

What is claimed is:

1. A lyophilized therapeutic peptibody composition comprising a buffer, a bulking agent, a stabilizing agent, and optionally a surfactant;
wherein said buffer is comprised of a pH buffering agent in a range of about 5 mM to about 20 mM and wherein the pH is in a range of about 3.0 to about 8.0;
wherein said bulking agent is at a concentration of about 0% to about 4.5% w/v;
wherein said stabilizing agent is at a concentration of about 0.1% to about 20% w/v;
wherein said surfactant is at a concentration of about 0.004% to about 0.4% w/v; and
wherein said therapeutic peptibody comprises a structure set out in Formula I,
[(X¹)ₐ—F¹—(X²)_{b}]-(L¹)_{c}-WSP_{d} Formula I
wherein:
F¹ is an Fc domain;
X¹ is selected from
P¹-(L²)ₑ
P²-(L³)_{f}-P¹-(L²)ₑ—
P³-(L⁴)_{g}-P²-(L³)_{f}-P¹-(L²)ₑ- and
P⁴-(L⁵)ₕ-P³-(L⁴)_{g}-P²-(L³)-P¹-(L²)ₑ-
X² is selected from:
-(L²)ₑ-P¹,
-(L²)ₑ-P¹-(L³)_{f}-P²,
-(L²)ₑ-P¹-(L³)_{f}-P²-(L⁴)_{g}-P³, and
-(L²)_{g}-P¹-(L³)_{f}-P²-(L⁴)_{g}-P³-(L⁵)ₕ-P⁴
wherein P¹, P², P³, and P⁴ are each independently sequences of pharmacologically active peptides;
L¹, L², L³, L⁴, and L⁵ are each independently linkers;
a, b, c, e, f, g, and h are each independently 0 or 1,
provided that at least one of a and b is 1;
d is 0, 1, or greater than 1; and
WSP is a water soluble polymer, the attachment of which is effected at any reactive moiety in F¹.

2. The composition of claim 1 wherein said therapeutic peptibody comprises a structure set out in Formula II
[X¹—F¹]-(L¹)_{c}-WSP_{d} Formula I
wherein the Fc domain is attached at the C-terminus of X¹, and zero, one or more WSP is attached to the Fc domain, optionally through linker L¹.

3. The composition of claim 1 wherein said therapeutic peptibody comprises a structure set out in Formula III
[F¹—X²]-(L¹)_{c}-WSP_{d} Formula III
wherein the Fc domain is attached at the N-terminus of X², and zero, one or more WSP is attached to the Fc domain, optionally through linker L¹.

4. The composition of claim 1 wherein said therapeutic peptibody comprises a structure set out in Formula IV
[F¹-(L¹)ₑ-P¹]-(L¹)_{c}-WSP_{d} Formula IV
wherein the Fc domain is attached at the N-terminus of -(L¹)_{c}-P¹ and zero, one or more WSP is attached to the Fc domain, optionally through linker L¹.

5. The composition of claim 1 wherein said therapeutic peptibody comprises a structure set out in Formula V
[F¹-(L¹)ₑ-P¹-(L²)_{f}-P²]-(L¹)_{c}-WSP_{d} Formula V
wherein the Fc domain is attached at the N-terminus of -L¹-P¹-L²-P² and zero, one or more WSP is attached to the Fc domain, optionally through linker L¹.

6. The composition of any one of claims 1 through 5 wherein said therapeutic peptibody is a multimer.

7. The composition of claim 6 wherein said therapeutic peptibody is a dimer.

8. The composition of any one of claims 1 through 5 and 7 wherein P¹, P², P³ and/or P⁴ are independently selected from a peptide set out in any one of Tables 4 through 38.

9. The composition of claim 8 wherein P¹, P², P³ and/or P⁴ have the same amino acid sequence.

10. The composition of any one of claims 1 through 5 and 7 wherein the Fc domain is set out in SEQ ID NO:1.

11. The composition of claim 8 wherein the Fc domain is set out in SEQ ID NO:1.

12. The composition of any one of claims 1 through 5 and 7 wherein WSP is PEG.

13. The composition of claim 8 wherein WSP is PEG.

14. The composition of any one of claims 1 through 5 and 7 wherein the Fc domain is set out in SEQ ID NO:1 and WSP is PEG.

15. The composition of claim 8 wherein the Fc domain is set out in SEQ ID NO:1 and WSP is PEG.

16. The composition of claim 14 wherein PEG has a molecular weight of between about 2 kDa and 100 kDa.

17. The composition of claim 16 wherein said PEG has a molecular weight of between about 6 kDa and 25 kDa.

18. The composition of claim 12, wherein said composition comprises at least 50% PEGylated therapeutic peptibody.

19. The composition of claim 18 comprising at least 75% PEGylated therapeutic peptibody.

20. The composition of claim 18 comprising at least 85% PEGylated therapeutic peptibody.

21. The composition of claim 18 comprising at least 90% PEGylated therapeutic peptibody.

22. The composition of claim 18 comprising at least 95% PEGylated therapeutic peptibody.

23. The composition of any one of claims 1 through 5 and 7 wherein said pH buffering agent is selected from the group consisting of glycine, histidine, glutamate, succinate, phosphate, acetate, and aspartate.

24. The composition of claim 8 wherein said pH buffering agent is selected from the group consisting of glycine, histidine, glutamate, succinate, phosphate, acetate, and aspartate.

25. The composition of any one of claims 1 through 5 and 7 wherein said bulking agent selected from the group consisting of mannitol, glycine, sucrose, dextran, polyvinylpyrolidone, carboxymethylcellulose, lactose, sorbitol, trehalose, or xylitol.

26. The composition of claim 8 wherein said bulking agent selected from the group consisting of mannitol, glycine, sucrose, dextran, polyvinylpyrolidone, carboxymethylcellulose, lactose, sorbitol, trehalose, or xylitol.

27. The composition of any one of claims 1 through 5 and 7 wherein said stabilizing agent selected from the group consisting of sucrose, trehalose, mannose, maltose, lactose, glucose, raffinose, cellobiose, gentiobiose, isomaltose, arabinose, glucosamine, fructose, mannitol, sorbitol, glycine, arginine HCL, poly-hydroxy compounds, including polysaccharides such as dextran, starch, hydroxyethyl starch, cyclodextrins, N-methyl pyrollidene, cellulose and hyaluronic acid, sodium chloride.

28. The composition of claim 8 wherein said stabilizing agent selected from the group consisting of sucrose, trehalose, mannose, maltose, lactose, glucose, raffinose, cellobiose, gentiobiose, isomaltose, arabinose, glucosamine, fructose, mannitol, sorbitol, glycine, arginine HCL, poly-hydroxy compounds, including polysaccharides such as dextran, starch, hydroxyethyl starch, cyclodextrins, N-methylpyrollidene, cellulose and hyaluronic acid, sodium chloride.

29. The composition of any one of claims 1 through 5 and 7 wherein said surfactant selected from the group consisting of sodium lauryl sulfate, dioctyl sodium sulfosuccinate, dioctyl sodium sulfonate, chenodeoxycholic acid, N-lauroylsarcosine sodium salt, lithium dodecyl sulfate, 1-octanesulfonic acid sodium salt, sodium cholate hydrate, sodium deoxycholate, glycodeoxycholic acid sodium salt, benzalkonium chloride or benzethonium chloride, cetylpyridinium chloride monohydrate, hexadecyltrimethylammonium bromide, CHAPS, CHAPSO, SB3-10, SB3-12, digitonin, Triton X-100, Triton X-114, lauromacrogol 400, polyoxyl 40 stearate, polyoxyethylene hydrogenated castor oil 10, 40, 50 and 60, glycerol monostearate, polysorbate 20, 40, 60, 65 and 80, soy lecithin, DOPC, DMPG, DMPC, and DOPG; sucrose fatty acid ester, methyl cellulose and carboxymethyl cellulose.

30. The composition of claim 8 wherein said surfactant selected from the group consisting of sodium lauryl sulfate, dioctyl sodium sulfosuccinate, dioctyl sodium sulfonate, chenodeoxycholic acid, N-lauroylsarcosine sodium salt, lithium dodecyl sulfate, 1-octanesulfonic acid sodium salt, sodium cholate hydrate, sodium deoxycholate, glycodeoxycholic acid sodium salt, benzalkonium chloride or benzethonium chloride, cetylpyridinium chloride monohydrate, hexadecyltrimethylammonium bromide, CHAPS, CHAPSO, SB3-10, SB3-12, digitonin, Triton X-100, Triton X-114, lauromacrogol 400, polyoxyl 40 stearate, polyoxyethylene hydrogenated castor oil 10, 40, 50 and 60, glycerol monostearate, polysorbate 20, 40, 60, 65 and 80, soy lecithin, DOPC, DMPG, DMPC, and DOPG; sucrose fatty acid ester, methyl cellulose and carboxymethyl cellulose.

31. The composition of any one of claims 1 through 5 and 7 wherein the therapeutic peptibody concentration is between about 0.25 mg/mL and 250 mg/mL.

32. The composition of claim 8 wherein the therapeutic peptibody concentration is between about 0.25 mg/mL and 250 mg/mL.

33. The composition of any one of claims 1 through 5 and 7 wherein said pH buffering agent is 10 mM histidine and wherein the pH is 5.0;
wherein said bulking agent is 4% w/v mannitol;
wherein said stabilizing agent is 2% w/v sucrose; and
wherein said surfactant is 0.004% w/v polysorbate-20.

34. The composition of claim 33 wherein P¹ comprises a sequence set forth in Table 6.

35. The composition of claim 34 wherein the therapeutic peptibody concentration is 0.5 mg/mL.

36. The composition of any one of claims 1 through 5 and 7 wherein said pH buffering agent is 10 mM histidine and wherein the pH is 7.0;
wherein said bulking agent is 4% w/v mannitol;
wherein said stabilizing agent is 2% w/v sucrose; and
wherein said surfactant is 0.01% w/v polysorbate-20.

37. The composition of claim 36 wherein P¹ comprises a sequence set forth in Table 32.

38. The composition of claim 37 wherein the therapeutic peptibody concentration is 30 mg/mL.

39. The composition of any one of claims 1 through 5 and 7 wherein said pH buffering agent is 20 mM histidine and wherein the pH is 5.0;
wherein said bulking agent is 3.3% w/v mannitol;
wherein said stabilizing agent is 2% w/v sucrose; and
wherein said surfactant is 0.01% w/v polysorbate-20.

40. The composition of claim 39 wherein P¹ comprises a sequence set forth in Table 4.

41. The composition of claim 40 wherein the therapeutic peptibody concentration is 100 mg/mL.

42. The composition of any one of claims 1 through 5 and 7 wherein said pH buffering agent is 10 mM histidine and wherein the pH is 5.0;
wherein said bulking agent is 2.5% w/v mannitol and
wherein said stabilizing agent is 3.5% w/v sucrose.

43. The composition of claim 42 wherein P¹ comprises a sequence set forth in Table 31.

44. The composition of claim 43 wherein the therapeutic peptibody concentration is 30 mg/mL.

45. The composition of any of claims 1 through 5 and 7 wherein the composition is selected from the group consisting of:
a) 10 mM histidine, pH 4.7, 4% mannitol and 2% sucrose, with and without 0.004% polysorbate-20;
b) 10 mM histidine, pH 5, 4% mannitol and 2% sucrose, with and without 0.004% polysorbate-20;
c) 10 mM glutamate, pH 4.5, 4% mannitol and 2% sucrose with and without 0.004% polysorbate-20;
d) 10 mM succinate, pH 4.5, 4% mannitol and 2% sucrose, 0.004% polysorbate-20;
e) 10 mM glutamate, pH 4.5, 9% sucrose, 0.004% polysorbate-20;
f) 10 mM glutamate, pH 4.5, 4% mannitol, 2% sucrose, 1% hydroxyethyl starch, 0.004% polysorbate-20;
g) 5 mM glutamate, pH 4.5, 2% mannitol, 1% sucrose, 0.004% polysorbate-20; and
h) 10 mM glutamate, pH 4.5, 4% mannitol, 2% trehalose, 0.004% polysorbate-20.

46. The composition according to claim 45 wherein P¹ comprises a sequence set forth in Tables 21-24.

47. The composition of claim 46 wherein the therapeutic peptibody concentration is selected from the group consisting of 1, 30, 85, and 100 mg/mL.

48. A method for making a lyophilized therapeutic peptibody comprising the steps of:
a) preparing a solution of a buffer, a bulking agent, a stabilizing agent, and optionally a surfactant;
wherein said buffer is comprised of a pH buffering agent in a range of about 5 mM to about 20 mM and wherein the pH is in a range of about 3.0 to about 8.0;
wherein said bulking agent is at a concentration of about 2.5% to about 4% w/v;
wherein said stabilizing agent is at a concentration of about 0.1% to about 5% w/v;
wherein said surfactant is at a concentration of about 0.004% to about 0.04% w/v; and
b) lyophilizing said therapeutic peptibody;
wherein said therapeutic peptibody comprises a structure set out in Formula I,
[(X¹)ₐ—F¹—(X²)_{b}]-(L¹)_{c}-WSP_{d} Formula I
wherein:
F¹ is an Fc domain;
X¹ is selected from
P¹-(L²)ₑ—
P²-(L³)_{f}-P¹-(L²)ₑ—
P³-(L⁴)_{g}-P²-(L³)_{f}-P¹-(L²)ₑ- and
P⁴ (L⁵)ₕ-P³-(L⁴)_{g}-P²-(L³)_{f}-P¹-(L²)ₑ—
X² is selected from:
-(L²)ₑ-P¹,
-(L²)ₑ-P¹-(L³)_{f}-P²,
-(L²)—P¹-(L³)_{f}-P²-(L⁴)_{g}-P³, and
-(L²)ₑ-P¹-(L³)_{f}-P²-(L⁴)_{g} P³-(L⁵)ₕ-P⁴
wherein P¹, P², P³, and P⁴ are each independently sequences of pharmacologically active peptides;
L¹, L¹, L³, L⁴, and L are each independently linkers;
a, b, c, e, f, g, and h are each independently 0 or 1,
provided that at least one of a and b is 1;
d is 0, 1, or greater than 1; and
WSP is a water soluble polymer, the attachment of which is effected at any reactive moiety in F¹.

49. The method of claim 48 wherein said therapeutic peptibody comprises a structure set out in Formula II
[X¹—F¹]-(L¹)_{c}-WSP_{d} Formula II
wherein the Fc domain is attached at the C-terminus of X¹, and zero, one or more WSP is attached to the Fc domain, optionally through linker L¹.

50. The method of claim 48 wherein said therapeutic peptibody comprises a structure set out in Formula III
[F¹—X²]-(L¹)_{c}-WSP_{d} Formula III
wherein the Fc domain is attached at the N-terminus of X², and zero, one or more WSP is attached to the Fc domain, optionally through linker L¹.

51. The method of claim 48 wherein said therapeutic peptibody comprises a structure set out in Formula IV
[F¹-(L¹)ₑ-P¹]-(L¹)_{c}-WSP_{d} Formula IV
wherein the Fc domain is attached at the N-terminus of -(L¹)_{c}-P¹ and zero, one or more WSP is attached to the Fc domain, optionally through linker L¹.

52. The method of claim 48 wherein said therapeutic peptibody comprises a structure set out in Formula V
[F¹-(L¹)ₑ-P¹-(L²)_{f}-P²]-(L¹)_{c}-WSP_{d} Formula V
wherein the Fc domain is attached at the N-terminus of -L¹-P¹-L²-P² and zero, one or more WSP is attached to the Fc domain, optionally through linker L¹.

53. The method of any one of claims 48 through 52 wherein said therapeutic peptibody is a multimer.

54. The method of claim 53 wherein said therapeutic peptibody is a dimer.

55. The method of any one of claims 48 through 52 and 54 wherein P¹, P², P³ and/or P⁴ are independently selected from a peptide set out in any one of Tables 4 through 38.

56. The method of claim 55 wherein P¹, P², P³ and/or P⁴ have the same amino acid sequence.

57. The method of any one of claims 48 through 52 and 54 wherein the Fc domain is set out in SEQ ID NO:1.

58. The method of claim 55 wherein the Fc domain is set out in SEQ ID NO:1.

59. The method of any one of claims 48 through 52 and 54 wherein WSP is PEG.

60. The method of claim 55 wherein WSP is PEG.

61. The method of any one of claims 48 through 52 and 54 wherein the Fc domain is set out in SEQ ID NO:1 and WSP is PEG.

62. The method of claim 55 wherein the Fc domain is set out in SEQ ID NO:1 and WSP is PEG.

63. The method of claim 61 wherein PEG has a molecular weight of between about 2 kDa and 100 kDa.

64. The method of claim 63 wherein said PEG has a molecular weight of between about 6 kDa and 25 kDa.

65. The method of claim 64, wherein said composition comprises at least 50% PEGylated therapeutic peptibody.

66. The method of claim 65 comprising at least 75% PEGylated therapeutic peptibody.

67. The method of claim 65 comprising at least 85% PEGylated therapeutic peptibody.

68. The method of claim 65 comprising at least 90% PEGylated therapeutic peptibody.

69. The method of claim 65 comprising at least 95% PEGylated therapeutic peptibody.

70. The method of any one of claims 48 through 52 and 54 wherein said pH buffering agent is selected from the group consisting of glycine, histidine, glutamate, succinate, phosphate, acetate, and aspartate.

71. The method of claim 55 wherein said pH buffering agent is selected from the group consisting of glycine, histidine, glutamate, succinate, phosphate, acetate, and aspartate.

72. The method of any one of claims 48 through 52 and 54 wherein said bulking agent selected from the group consisting of mannitol, glycine, sucrose, dextran, polyvinylpyrolidone, carboxymethylcellulose, lactose, sorbitol, trehalose, or xylitol.

73. The method of claim 55 wherein said bulking agent selected from the group consisting of mannitol, glycine, sucrose, dextran, polyvinylpyrolidone, carboxymethylcellulose, lactose, sorbitol, trehalose, or xylitol.

74. The method of any one of claims 48 through 52 and 54 wherein said stabilizing agent selected from the group consisting of sucrose, trehalose, mannose, maltose, lactose, glucose, raffinose, cellobiose, gentiobiose, isomaltose, arabinose, glucosamine, fructose, mannitol, sorbitol, glycine, arginine HCL, poly-hydroxy compounds, including polysaccharides such as dextran, starch, hydroxyethyl starch, cyclodextrins, N-methyl pyrollidene, cellulose and hyaluronic acid, sodium chloride.

75. The method of claim 55 wherein said stabilizing agent selected from the group consisting of sucrose, trehalose, mannose, maltose, lactose, glucose, raffinose, cellobiose, gentiobiose, isomaltose, arabinose, glucosamine, fructose, mannitol, sorbitol, glycine, arginine HCL, poly-hydroxy compounds, including polysaccharides such as dextran, starch, hydroxyethyl starch, cyclodextrins, N-methylpyrollidene, cellulose and hyaluronic acid, sodium chloride.

76. The method of any one of claims 48 through 52 and 54 wherein said surfactant selected from the group consisting of sodium lauryl sulfate, dioctyl sodium sulfosuccinate, dioctyl sodium sulfonate, chenodeoxycholic acid, N-lauroylsarcosine sodium salt, lithium dodecyl sulfate, 1-octanesulfonic acid sodium salt, sodium cholate hydrate, sodium deoxycholate, glycodeoxycholic acid sodium salt, benzalkonium chloride or benzethonium chloride, cetylpyridinium chloride monohydrate, hexadecyltrimethylammonium bromide, CHAPS, CHAPSO, SB3-10, SB3-12, digitonin, Triton X-100, Triton X-114, lauromacrogol 400, polyoxyl 40 stearate, polyoxyethylene hydrogenated castor oil 10, 40, 50 and 60, glycerol monostearate, polysorbate 20, 40, 60, 65 and 80, soy lecithin, DOPC, DMPG, DMPC, and DOPG; sucrose fatty acid ester, methyl cellulose and carboxymethyl cellulose.

77. The method claim 55 wherein said surfactant selected from the group consisting of sodium lauryl sulfate, dioctyl sodium sulfosuccinate, dioctyl sodium sulfonate, chenodeoxycholic acid, N-lauroylsarcosine sodium salt, lithium dodecyl sulfate, 1-octanesulfonic acid sodium salt, sodium cholate hydrate, sodium deoxycholate, glycodeoxycholic acid sodium salt, benzalkonium chloride or benzethonium chloride, cetylpyridinium chloride monohydrate, hexadecyltrimethylammonium bromide, CHAPS, CHAPSO, SB3-10, SB3-12, digitonin, Triton X-100, Triton X-114, lauromacrogol 400, polyoxyl 40 stearate, polyoxyethylene hydrogenated castor oil 10, 40, 50 and 60, glycerol monostearate, polysorbate 20, 40, 60, 65 and 80, soy lecithin, DOPC, DMPG, DMPC, and DOPG; sucrose fatty acid ester, methyl cellulose and carboxymethyl cellulose.

78. The method of any one of claims 48 through 52 and 54 wherein the therapeutic peptibody concentration is between about 0.25 mg/mL and 250 mg/mL.

79. The method of claim 55 wherein the therapeutic peptibody concentration is between about 0.25 mg/mL and 250 mg/mL.

80. The method of any one of claims 48 through 52 and 54 wherein said pH buffering agent is 10 mM histidine and wherein the pH is 5.0;
wherein said bulking agent is 4% w/v mannitol;
wherein said stabilizing agent is 2% w/v sucrose; and
wherein said surfactant is 0.004% w/v polysorbate-20.

81. The method of claim 80 wherein P¹ comprises a sequence set forth in Table 6.

82. The method of claim 81 wherein the therapeutic peptibody concentration is 0.5 mg/mL.

83. The method of any one of claims 48 through 52 and 54 wherein said pH buffering agent is 10 mM histidine and wherein the pH is 7.0;
wherein said bulking agent is 4% w/v mannitol;
wherein said stabilizing agent is 2% w/v sucrose; and
wherein said surfactant is 0.01% w/v polysorbate-20.

84. The method of claim 83 wherein P¹ comprises a sequence set forth in Table 32.

85. The method of claim 84 wherein the therapeutic peptibody concentration is 30 mg/mL.

86. The method of any one of claims 48 through 52 and 54 wherein said pH buffering agent is 20 mM histidine and wherein the pH is 5.0;
wherein said bulking agent is 3.3% w/v mannitol;
wherein said stabilizing agent is 2% w/v sucrose; and
wherein said surfactant is 0.01% w/v polysorbate-20.

87. The method of claim 86 wherein P¹ comprises a sequence set forth in Table 4.

88. The method of claim 87 wherein the therapeutic peptibody concentration is 100 mg/mL.

89. The method of any one of claims 48 through 52 and 54 wherein said pH buffering agent is 10 mM histidine and wherein the pH is 5.0;
wherein said bulking agent is 2.5% w/v mannitol; and
wherein said stabilizing agent is 3.5% w/v sucrose.

90. The method of claim 89 wherein P¹ comprises a sequence set forth in Table 31.

91. The method of claim 90 wherein the therapeutic peptibody concentration is 30 mg/mL.

92. The method of any of claims 48 through 52 and 54 wherein the composition is selected from the group consisting of:
a) 10 mM histidine, pH 4.7, 4% mannitol and 2% sucrose, with and without 0.004% polysorbate-20;
b) 10 mM histidine, pH 5, 4% mannitol and 2% sucrose, with and without 0.004% polysorbate-20;
c) 10 mM glutamate, pH 4.5, 4% mannitol and 2% sucrose with and without 0.004% polysorbate-20;
d) 10 mM succinate, pH 4.5, 4% mannitol and 2% sucrose, 0.004% polysorbate-20;
e) 10 mM glutamate, pH 4.5, 9% sucrose, 0.004% polysorbate-20;
f) 10 mM glutamate, pH 4.5, 4% mannitol, 2% sucrose, 1% hydroxyethyl starch, 0.004% polysorbate-20;
g) 5 mM glutamate, pH 4.5, 2% mannitol, 1% sucrose, 0.004% polysorbate-20; and
h) 10 mM glutamate, pH 4.5, 4% mannitol, 2% trehalose, 0.004% polysorbate-20.

93. The method according to claim 92 wherein P¹ comprises a sequence set forth in Tables 21-24.

94. The method of claim 93 wherein the therapeutic peptibody concentration is selected from the group consisting of 1, 30, 85, and 100 mg/mL.

95. The method of any one of claims 48 through 52 and 54 further comprising, prior to lyophilization, the steps of:
b) adjusting the pH of the solution to a pH between about 4.0 and about 8.0;
c) preparing a solution containing said therapeutic peptibody;
d) buffer exchanging the solution of step (c) into the solution of step (b);
e) adding an appropriate amount of a surfactant; and
f) lyophilizing the mixture from step (e).

96. A method for preparing a reconstituted therapeutic peptibody composition comprising the steps of:
a) lyophilizing a therapeutic peptibody composition according to any one of claims 1 through 5 and 7; and
b) reconstituting said lyophilized therapeutic peptibody composition.

97. A method for preparing a reconstituted therapeutic peptibody composition comprising the steps of:
a) lyophilizing a therapeutic peptibody composition according to claim 8; and
b) reconstituting said lyophilized therapeutic peptibody composition.

98. A kit for preparing an aqueous pharmaceutical composition comprising a first container having a lyophilized therapeutic peptibody composition of any one of claims 1 through 5 and 7, and a second container having a physiologically acceptable solvent for the lyophilized composition.

99. A kit for preparing an aqueous pharmaceutical composition comprising a first container having a lyophilized therapeutic peptibody composition of claim 8, and a second container having a physiologically acceptable solvent for the lyophilized composition.
